United States Patent Application Publication US 2026/0315545 A1 - sequence listing, part 2

SEQ ID NO: 1 - DNA, 3576111 bp, Dysosmobacter welbionis (residues 1,788,057-3,576,111 of 3,576,111)
  source 1..3576111: mol_type = genomic DNA
ggtctggcccttggcggcgtcggaaccggcgtcggattcggtcaggcagaaggcgccgaccttgtggcccttggtcagcatgggcaggtacttggccttctgggcctcggtgccgtgggtgatgatgggatcgcagcacaggccgttgtgggtggccacgatgtcgccggtggaggcgcactgcttggacagctcctcgatgcagatggcactggccagggggtcagcgccagcgccgccatactccttggggacgcacatgcccatcacgcccaggttgaacagcttctcgatgttctcccggggatactggctggtcttgtcggtctcggcagcgatgggcttcacttcattctcggtgaattccgccatcatcttccggaccagctggtgctcacggctgagattgaaatccatgatgtcttctccttatattcaaatttggaaaacgcaacgatgtatgaaatattccggcaggtttgcttatgaaattctgttttgcacgaattcacttcgggcaaaacacctctgcccgccgggtcgacatgttcgctgtgcgaacgtgagggggaaaccggcgatgcgccgccagcggcagagcaagcgagccggtttcgaggcagcggcgcgcttggcggcccgtcaggggccggggatcgcaatgccgcaacagtgggaccttagttctggatgccggcgatctccttggccatctgcttcttggcctggaggttgccctggcgggcgatcatgatgcgctgggcctggggagagcccgcgccgtgcatggactctgtccggtagccaacggcggccgcgcccaggcacaggttctcgatgaaccgcaggatccgctgacggtcctctgtgctcacaccctcccgggtggcgaagaacttgttgcagatctccccgatggtctcgccgttccggcccaccaccgtgtcggagtggaagtccttctgggacggcatcgtcaccaccaggccgcccgcgatgtcctccgccaggcggacgatctcataggggaaccgagtcacattctgcttgcacacgttggccagcagcaggtcgatctgatagttgcccgccttcgtccggaagccctgagaggagcaggcgatgccgcagcagtacagcgtctcgttcaggtggatcatctcgatcagcttgtccttcaccgcgctggccttctccacgccgttgtactccgctgccagcgccgcagcaccgatcagcgtgtcgcccacgcccaccttgcagccgccgtagctctgccggtggtagcccgcgaaccgctccaccatcatgccggcgaactcatactcgccgttgaggaagatgtactcgttggggatgaacacgtggtccagcaccaccagggcctcctggccgccgaacttcgcgttgcccacgtcgatggacgcgtcctcctccagcttccgggtatcgcagctctgacggccgtagatcatgtacatgccctcggcgtctgtcgggcaggcgaagctcaccgcccagtccttgtccgcctcgcccatggagatggtgggcatgaagatgtgccagtggctgttgatggagccggtctggtggcacttggcgccgcagaccacgatgccgtcagcgcggcgctccaccacatgcacgtacatgtccgggtccgcctgctggctgggggccttggaccggtcgcccttggggtcggtcatggcgccgtccaccgtcaggtcgttgtcctggacgaaggtcaggaacttcttgaagttttcgtgatagcgggtgccgtacttctcgtcgatctcataggtggtggagaacacggcgttgaacgcatccatacccacacaccgctggaagcaggaagcggtcttctggcccagcaggcgctgcatcttcaccttgttgatgaggtcctccgtggactggtgcaggtgggtgaagcggttgatggtgtggcccgtcaggctggacttcaccgtcatcaggtcggcatactgcgggtcctgggccagagcgtaggtcatggccacgcagttgatggacgggcggatcatggggtggtccacccagttctcaatcttctccccgaacatatacacccgggtattcagtttgcgcaggctctctacatactcctgtgcggtcatcaatgccatttcttttttcctcctcaaaaaaatgggggtcttttacatttcaatgtgttccaggtgagcttcgcctgcccggaactccatggcccgcgccactgggcgcggctccctcgccgtgtgagggagagggggaacccggctcgcttgatccgccgctggcggcgcttcgccggtttcgaggcagcggcgcgatttgcggcccggtcagggctggaaatcgcattgctgcgacggtggaaattctcaggcttccgccagtcccatcagctcatctttgaagatgcgctcgtccataagcttcaggtcctcagcgatcttcggcatgaactccatctgatccagcacctgggtctggaggtcgatgcccggcgcgatctcgatcagagtcacgccctcgggccgcagctcgaacacagcccgctcggtgatgtacagaacaggctgcttcacctgcacggcatacttgccggagaaggtgatgtgctccacctggttgacgaacttcttcttggcgccctcctggacgatcaccagcttgccgtcctcgcaggcagtcttcaggcccttggcggtgaaggtgccgcaatagaccaccttcttggcattctgcgtaatgtcgatgaagccgccggcgccagccagacgggtgccgaacttggacacgttcaggtcgccgttgggtgccgtctccgccaggcccaggaaggccacatccaggccgccgccctggtagaagtcaaactggacgttgtgggggatgatggccatggagttggctgcggcgccgaactgggtgccgcccatgggcacgccggcgatggagccggcctccacagtcagggtcatcttgtcggagatgccctcctccgccgccacgttggcaattttttccggcgcgccggtgcccaggttcacaatggcatcctggggcagctccatggcggcccggcgggcgatgatcttcttggcgtccagcgggatgggtgggatggcgtccacgggaatgcggaactcgccggtcaggctgccgtcatagggcattcccaggcactgctcgttatcctcaatggatcctaccacaatagaatccacatagataccgggaattgccaccagtttcggatccaggctgccgccttggacgattttttccacctggacgatgacccggccgccggagttcttgcaggcctgagccatggcggtgacgtcgatggggccgatctcccggtgaacggtgcagttgccgtactcgtcggcgtagctggcacgcaggaacaccacattgatggggaacgccttgtagagcaaccgctcctggccctcgatctcgacgaccttcaccaggtcctccttggtgacatcgttgagtttgccgccgccgttgcgggggtcggcaaaggtgtacaggcccacgtgggtgatggtgccgatgttgtgggccgcgatgtcccggtacatgtgggagatgacgccctggggcaggttatacgcctcgatcttgttgctcagggccagatcgcccagcttgggggcccggtcccagtggccgccgatgacccgcttgaccatgccctcgtggccgtagtggtcgccgccggtgccgtcccggtggccctggcctgccgcgaagaacagcgtcagatctctgggatggcccgtctccaggaaccgcttctccaatgccttggacagcgcctcagggcaggcgcagctgacaaagccgccggtggcgatggtatcgccgtcgttcaccagcagcgccgcctcctcggcggtaagcacgcgaacttttttcatgcctgacttccctctttatatgtaatgaaatggacggcctcttgccggtctgcgctcacttgttctggaagtgcttctccttgcgcttctccaggaaggcgcccatgccctccttctggtcctcggtggcaaagcacatggcgaacagctcgttctccagggcgatgccgttgtcgatgtccatctgcatcccgcggtcgatgcaggccttggaatacttcacagcgatgggggcgttggcggtgaaggacttggccatctccacagccttgttcagcagctcctcggcggcatagacctcattcaccaggccgatgcgcttggcctcctcagcaccgatctgcttgccggagaagatcaactccttggccttggccacgcccacacggcggggcagacgctgggtgccggagaagccgggggtgatgcccaggcccacctcgggctggccgaacttggcgccgcccttgccctcagcgttggggccggcggccagaatgatgtcgcaggacatggccagctcacagccgccgcccagagcgaagccgttcactgcggcgatggtggggatctccagcttctcgatccggcggaacagggcgctgccccgctggccccacttgcggccggcggccacgtccatggtgctctgctcgccgatgtcggcgccggccacgaaggagcggccctcgccggtgatgatgaaggcgcccagctcggcatccttctccacctcgctgatgagctgttccagctcagagatcacggtggagttcagcgcattcagcgcctcggggcggttgatggtggcgatcccgatattgccgttcttttcatagcgaatggtctgatacatattggaatgtcctccttaatcatattttgctcagcaaactgttggagagtaatcatccaacaatttagttatagcaaaaatcatgccatttttccaggtgtaattctctcattttcggttcgtttttttgtgtaggttgctaaaatccaagtggtaaatcgcttgcttttcccggtgccgtcagccgtttccatacgggattattcatttttgaataacaaatttatcagtgtcttccagcattttccgcagtttgtttgtgaaatacagcagtctgtctgtcgaattttcgtgaaatttcacgagccaaaaatatttcccgcctcttcctattcatttttgaatatgctatactcatttttgaatagagcaaccggcattcagtccggcacaggaggtctgcgcctatggcgattccgtctttttctgctttccacgacgaggggatcaatctggagggacttctggagatcctcagcccggaaaacaacttggtcctggcggacgacatgatggtctcggacggcaacggcatcattctgcgggtcagcgagacctatgagaaaaacttcggttttgcccatgactccatcgttggcaagtccgcctttgatctggaggcggacggcaccttcaccccctgcattacggcggaggtcatccggcgacggaagaagatcagcgccacacagaccatcaaccacacccacaaaaacgtgatgaccgtgggcattcccctgtttgacgccaacggggagctgaaatacgccgtctgcttcaacaccgtgtccatggagcagatcaactccatccaacggaactaccgccggatacaggactccctgcagcactactcccaggagattgccgagctgcggacccgggccacctccaccaatctgctgttcaaaagcgcccccatgcagcggctgtggacgctgatgcagaacactgccaacacccgggccaacattctcatcaccggagagaccggcgtgggtaaaagcgccatcgccaaggccattcacaagatgagcaaccgtgcaaacgggccctttatcgaggtaaactgcgcggtgctccatgaaaatctcattgagtcagagctgttcggctatgagaagggcgccttcaccggggcctcctcctccggcaagatcggcaagatcgagctggccaaccacggcacgctgttcctggatgagatcggtgagctgcccgcccatatccagtccaagctcctgcagctgattcaggagaagaccattgagcgcctctccggcacccagaagatcgagctggacttccggctgatcgttgccaccaaccgcaatctggaggaggcggtgcagcgcggtctgttccggtccgatctcttctaccggctgaacgtcatccgcatccacatccccccctgcggcagcggaaggaggacatcgtccccatggcccaccagttcctggcccgcttctgcggggagtacaacaagtccctcacctgcagcccccgctttctggcttttctggagcagtacgattggcccggcaacgtgcgccagctggagaacctgatggagcggctggtaatcactgcccaggaccccattctggacattcctgccctgccgctggagtacaccgccgacgcgtcggcccctgcggagctgcttcccggcggcacgctggcagagcggatggacgcctacgaggcccaaatcatccgggattcctaccagcggtgcggcaccacagtggccgtggcccgggagctgggcatctcccaggccacagcagcccgcaagattgccaaatacgtgaccgcccgggcgtgagaggaggttccggtccatgagtttgatccatctcagcacagagcttcggcaggagctgaagctcaccccccagctcctgcagtccatggagcttctgcagatgaactcccaggagctgctggactatctgaaccaggtcagcgaagaaaaccctctggtggagcagactgatctgtcctccctccacaaagcctatgaggccctgcggcagaaggtccactggatcaatggcggcctgccggaggacggccacggcgccatgccggaccggggcgccgcggaccgggagacggagagcctctccgccttcctttgcgaccagctggagcgccggcgcctgcccaagcccctgctggccctgacccggtatctggcagagctggtggacgaggagggccgcctcagccaggaggacctggacggcgtggcagatctgaagatcccccaggccctgacccagcaagcgctggagaccctccagagcctggaccccgccggcgtgggcgcccggtccctgtcggagtgcctgctgctgcaactggcccggcaggatgctccctcccccctggatatggagatcgtccgccgcttcctgccggacttgggcaagaagcattacagcctcattgcccgggaactccataccacgccagaggaggtccgggcggcggaaaagcggatctctgccctggatccctgccccggccgctccttccagccggcggagcccacactctatgtccggccggatctgttcatcgcggaactggacggaaagctccaggtgatcctgaacgattactaccttccccgggtgtccatcagccagtactatgtgcggcttctgaaggaatccgacgagccggagacccgggcctatctccagcaaaagatgcagcaggccaagtggctgctgaacagcctggagcgccggggcagcaccctccgccagtgcgcggaggcgatcctggagacccagcgggccttttttgccggccagaccacagagctggtccccatgaccatggtgacactggcggagcgactccacctccatccctccaccgtctcccgggccactcgggagaaatacctccagtgccggcaggggacgtaccccctccgctatttcttcagccgcgctctgggggagcagggtccctcccagcagacggtgaagctgcggctgctggagctgatccggcaggaagaccacagccgcccgctcagtgaccagaagctggcggagctgctggcggagcagggcatccgcatcgcccgccgcacggtggccaagtatcggacggagctccgcctgggctccgccgccgcccgaaaacgggactgagggcctactggcccgcagaggcccgcaggatagaaacggaagccccggacggagtttcgtccggggcttccgtgtttttccgatttacaggatccgaaggacctcttcatatcccggcaccgcatccgccgcgccgggccgggacacagccagggcgctggccgccgcggccagggacagtgcctcttccagtgtgccgccctccagcgcccggcgcaggaagtagccggtgaaggtgtctcccgccgcagtggtgtccaccaccgccgttttccgggctgggccccaggcccgccagccccctcgcgctgcagcagcgccctgttctcccaaggtcagcaccacagtggtctccgggtaccgcgccgccagcgtgtccagaatcgcctccggcgcctccgttcccgccagaaaggcgccctccacctcgttcaccaacagccaggacagcgcctccagcggcaggcccaccagcttctcattggcgggagccgcattcatggccgtccgcatcccccggcgggccgcctggtggatgatttcctccacgcagctggtctcattctgcagcagcaccgtgtccccggctgagaactgatccagcaccgccgtcacaaagtccggggtcaggcggccgttggccccgtcgtggagcaggatgctgttctggccggtgctgtccacttggatgatggcgtggccggtactgcctgcggactcctccacaaaccgggtgtggacgcctgcccggtccagcgtctccttcagaaaatgcccctccggcccgatgaggcccgcgtgccaggtctccaccccggcccgagccagagccacggactggttcagccccttgccgccgcactggatctgcagggactgggcgctcatggtctctccgggctggacgaagtggtccacccggtagacgtagtcgatattcagggacccgaagttgacaacgcgcatatccttctcctccctcatgccataaaggtggtgagcagctcttccagggcgcggcggctgtccacatccacgcagatggagacgccgggagcctcgatgggatgctcccgcagatccgccaccaccatgccccggcagaagctgccgccgcactccacccgggcggggatggtccgcaccgtcaccacactgggatccaccgccgccagcatggccagcgggtcgtggaccgggcagtggtccagacagttgttttgcagtcggttgaaccggaagtagaagggcagtgcctgcttcagatagtccacaatgggccggttctccggcgcggcgtacttgtccaggatcgccacatggtccgtggtcagccgcaccttctgggtcacatccagccccaccatagtcaggtcaaagcccgcctggaacacccggtccgccgcctccgggtcccctgcgatgttggcctccgctaccggggacacgtttcccggcgcgtggaacgtgccgcccatgaacaccacccgtttcaacagccggggcagatccggctctatctccagagcctttgccagattcgtcattcgggccagcgtcaccaaggtcagctcgccggggtgctcccgggccattcgggcgatgaacgcccaggccggttcctccagcggctgctggggcgaaggcggcagctccaccccgccgatgccgttgggcccgtggatgtggggatccggccccttccagttccccgccagcggctccgtggctccaaccgccaccggcacctcataaggcacaccggccagtcggatcagccgcagactgttttccgccgcctgccgggctgtggtgttgccgaagccggtggtgacgcccatcacccggacgtccggccgcttcagggcaaacagaatggcgatggaatcatcaatgccggtgtcggcgtcgatcaggatctgcttcagcatattccttcctccctgtttatgtagtctctccgccgtctttggcggcggcaatccggacccccagaccgttgacctccacactctcgtccgccgggaccagcaggtagcgccgtccgtcgatgatccgggcctccaccagatagctccgctccgggtccacctggatagtggcgtcggcggtcttgaccgcgaagtgcttggcgtcgatcaggttggccggggtcagcgccccctcgccaaaggactggccgcaggcggtttggaacgcctccacccgctcctccggcacgccgcagttccgcagcacgccgctcacctcgcctgcggtgacagccagcggctccgggtcccggctctccttgtgttcctggatccgctggcgcaggtagtcgtggacagactgcaccacctccatgctgcacgccccctccagagtgccgcacagggcggactgaaaggtctcccgctgctcggcggcggacatgggcggctctgtgcggaacactgcgtcaatgaactcctgatggagctcgtccggcttccggctgtaaaacagggcgttgtaaaggttggccgtccggtcatcaaaggccgggaacaaaaagccaagctccggctggcccacgatctgcttctccatagagatgtggaactcgttctccccatggaagtatcccagctccggcgtcccatccttcaccgggcagacgcagcagacgaagtagcggaacacctcttcgcaggcatcccggtccacctcgccgtccttgccccggtggggcacatcataggcgtcggcccccagcaggatcagatagttgttctcccccatgtccagggagccggtgacctgctggtaaaaggcatcccgggcctccgcgtccttcagctcggacgtccgcagggcggagagcaggcggtgctcctcgctgtccgccacctgctgggtggaaaacacgatgtcaatcaggttccggcccagggtgccggacagggcctttttcagcaggcccaggtatttttccgcctcctcctggggcatgaggcctagggactggtcgatataggcgatgatctcgcggctgctgttcacatagcagccgtaaacacggctgatggcgctcttctccggccggaaccggcggcgcagctcacccagctctctttggttcatgggggacacctcgctcgttcaaattgatcccagcgggaccgcagtcctgccgggtctctatcttagcacatctccgccgtcttgtcacgccgaaaggggcggacaggaaaaacggcgggaaccgcagtccccgccgtttcacgtttcaaatgcgctccaaaggatgtccgcttactgggcagccatcttccgggccctggcctcagccttgttccggaacacgtcgatggtgaccgccagaatgatgacggcgccgatgacgatgtactgaatgtcgttggaggcgcccatcaggttcaggccgttgcggatgaccgccatcagcagggcgccgatcagggtgccccagatggtgcccttgccgccggtgaaggaggcgccaccgatgatgcaggccgcgatggcatcagtatcataggtggagccggcattgccgttggcagaagccagacgacccacggacaccacgcccgccatgccggccatgaagccggacagggagtagacgaaggtcagcacgttcttggaggggataccggagaggcgcgccgcctcggggttgccgcccacgcagtagatctggcggcccagggcggaccgggtcaggaacacgtggaagatgccgaacacgatcagcaccaggatgaagctgaaggggatgccggggaaggtctcggtcttgaaaagggagccgccgccgatccacatcaggttgtccacgccggtgttggtaaaggcaatggatttcgaccctgtaatcaccagggccaggccccacagcacgttcttcatgcccaaggtggacacgaagggatggggcaggtccaaacgggtcagcagaatgccgttgacaaagccggcaaacgtgctcaccgccaggccggcgatgatcagcagcggcatgctggtgatgccgaagttctggaccagcacgccgatggtgcaggtgcacagcacgcagttggaacccacggacaggtcgatgccggcggtaatcagggcgcacagcatgccggaggcgatcaggcagttgatggaagcctgcttgaagatgttcatgatattgctgatccgcgggaatttatcgggcatcatcacgcagaaaatgagaaccagcagcgccagcgccatcagggtgccgagcttttgcaaaagctcttttccggaattcttctttttcatatcagtctaattctcctccccaggccgctttcatgatatcctcagagttgaagtgcggggtatcacggtcgatattggccatgacccggccgccccgcatgaccaccacgtggtcactcatggccaggatctccggaagctcggaggagaccatgatcacacacttgccggccttgaccaggtcattcatgacatggtagacctcgatcttggcgcccacgtcgatgccgcgggtgggctcgtcgaaaatgaagatgtccgcgtcggtgttgacccacttgccgataaccaccttctgctggttgccgccggagagctgggccgtcacctcgtccagggacggagtcttgatccgcagggactccacattgtcctggccggacttctcaatcttccccttgttcaggaagggtccgttggagaagcccttcatattggccagaatgaggttggtccgcacgtccagggacagcaccagaccctggcccttgcggtcctcggtcaggaaggcaatcttcttcttgatggcgtccttgggcgtccggatatgtaccttctcccccttgacgtagatctcgccgctgtccaacctgtcggcgccgaagatggcccgcatggtctccgtccgcccggcgcccaccaggccagcaaagccggtgatctggccgccgtaggccttgaagctcacgtcatggaggacgccggcctcgttgaggttcctggcctccagccacacgtcgcccttgacgccgaactctttgggatacaggttgtccagcgtccggcccaccatggcgttgatcagggagtcctccgtcatgtcaccgatgtcctgggtgacgatatgttcgccgtcccgcatgacggtgacccggtcgcagagctcgaacagctcttccaatttatgagagacgaacaggatggccacgcccttggccttcaggccccggaccgtctccatcagctggttgatctcctccttgcccagggaggaagtcggctcgtccatgataatcagcttggcgtccagcgacacagccttggcgatctccaccatctgctgctggccggtacccagcttgccgcattccattttaacatcaatttcgggatggcccagcgtggtcagggcctgcttggcttcctcgtacattctggggtagtccagaaggccgtttttcttgacggcgcgtcccatgaaaacgttatccgtgacagacagctgcttgacgatgttcagctcctggtacacgcaggcaatgcccgcctcgcgggactggacggggttgtggaagacgaccttctggccgtccacgtagatctccccctcctcaggagtgtgaacgccggtgagcaccttaatcaaggtggacttgccggcgccattttcgccgatcaggccgtggatctctcccggccggatgccaatagacatatttttcaatgcgacgacaccaggaaaacgtttggtaatgttcttcaactcgacaacatactcgctcatgggattacctcgtttctgtttcctgatttcagcggtccccgccgcccgcggggaggtgcggaacgggaatatggcggcaggaccactgccgccatattccattcattcagatgtgagatctgaggggcacaggctgatcagccctgcatggcagccaggctatccaggtactcctggccgttctcagcggtgaccacggtgacgggagcgttgatgacctcttccacggtctcgcccttgatggccttcagcgcggcctccacggcctggtagcccatctcatagggctgctgggcaacggtggccttcaccatctcgccggccaggatcagatccacggcggaggcgttgccgtcgaagccgacgataatcatgtcgtccacgccggcggacttgcaggcgttcatggcgccgatagcggtatcgtcattgtggcagagcacgatgtcgatctggtcgggataagcgttcagcaggtcctccatggtcttggtggcgccgtcggtggtgttctggccggacagagcgtccagaacggtgacgccggcctcgtcgcaggcggcctgatagccctcgcggcgcatattggaggtgttgtcgccctcctggccatagatgatgacggcgttggcgccctcaccggcctgttcagcggcccacaggccgccttccttcgcggcgtccacgttggaggtgcccacgaagctggtctgaccctcgatgcccacattggtatcgacggacagaacggggatgctgccgatggcgctggcaagcgcaccggaagcggcgccggcgtcattgggagcgacgatgatggcatcgcagcctgcgccgatctgctgctcaatcatagaaacctgctgctcgatctcgctctcagcgccggggcccaccacgttgacggtaacgcccaggtcagcggcagcggcatcgcagccggccttcacatagccccagtactcggaggccagggtcttcaggaccacagcgatctccacatcgctggcagtggcggtatcgccgccgttctcctcggtagcagtgtcatcggtgctggtgtcttcgttggcggtatctccgccgccgcaggccaccagagacagggacatcaccagtgcgaggagaagtgcaaaaaactttttcatcttacttcttttctccttcttaattggtttcctctcacattcaggcagaaatggatctgaactgcgggagtaagaagattttaacatggtgtgcttatacagtcaacgtgttaacgtaaaaaacagctattattacaattttgcggaacttttttgcacaatatgcagaaaattttttatcagctaatcatttacttgacagcgtcggctttttatcaggcgcccggcggcgtccagtttgcgcaaatttttcgcaaatctgccgcacagcctctctatcccccaaaaaccgctcccctgggtgtcgccgcaggcgcgcccgtcctacattatataatataaagaggtgcggacatgcctgttccgcacaaaaaacgccctcccggcttgggagggcgttcggaccatgtattctcagacggagatgattttccaggcgcaccagagcaggagcagcgccataacggcgttgacaaatttgtaataccggctgtacagcgggtacagcagcgcgcccagcgtggcccagatcaggtttccggtggcggcgcaggcagccatgatgacagagaagcacagcacggctggcaccgtatacccatggggcaggatataaccggaataggcggcgatccccagcatcaggatgtggacgttcaggaattgcaggaggaagccgttcacataggacagcggcttgccggaggggccggcctccttcttggcgccggggctgcgcatcagcgtgcggtaggccagatagaggatataagccgcgcccacatacttggccacggggacaatctgcggcaccagctctcccagccaggcacagccgaagccgcacagcagcataacggtgatcaatcccgcccagatcccaaaaatcagcggccagcacttccggatgccgtaccggctggtgctgctgaacagcagaatgttgttgggtcccggggaaaaggtggttgcacaggcatacgccgccagttgtaaatagactgctgtcatgggaactgcccctttctctttatcagatactgtcccgccgcggcgtcagctgaagacgccggccttgcacagctcgatgaactgcttggccacccgggcgctgcgtccgccggagcggaccgcgaatgcctcactgcggaccgccagctgtctggggtccagctccaccccgtactgcttggccagctcctccacaatgtggagataccgctcccggtcggggctgccgaaggtgatggtcagcccaaaccgggcggacaggctcatcagctcctggcgggtgtcgctctcgtggatgtcgtcgccctcccggtcggtgagggtctccttaatcaggtggcggcggttgctggtggcgtagacggcgatgttgccggcccggccgcccacgctgccctccaggatcgccttgagggcggcgaagttgtcgtcattggcggtgaagctcagatcatcgatgaagaggatgaacttcagcggattggacgccagggcgtccatcaggtccgggatctgatagagctggttcttcttgacctccaccagccgcagcccctggtccgcgaaggcgttggcgatggccttgatggcgctggacttgccggtgcccgcgtcaccatacagcagcacgttgttggcgggctttccctccagcagggcccgggtgttggcgatgaccttctcccgctcccgctcatagccaggcagctcctccagcctctggggatccgggtgcttcaccggcgccagttgcccctcctccaccgtgaacacgtggtaccgggcgaagatgccgtagcccttcacccccacctcctccatccggcggaggtattcccgggtgatatcggtgggagacacgacccagcccaccagaaattccggaggctcccgcagacccgccgtcaggtcctccagctgcagctgggagagctggtcgaagaaggccagctcccgccgcaggctttcctgaaggacggagctcctgcccaccgcctgcccccggatgcagacgttctcgctctccagcaccgtctcccgcagatagcaggaccagctgtcgctggactggaagagggcggcttcaaatccggcgcaggcggcggagaaatcgccgctgtccccccgcacccgggcggagagcatctcgccgcaggcggccaccaccgggtcctgcagcagccggcggaacaccacaaggcccgtcagccgccggtacatctcttgtacgtgcatgttgcattcctcccgatctcaggccttcagcggaggaccgcgccctcgtcggcgctggtgaccatccgggcgtaacggcccagccagccggtggtgatgttgggggcaggctggacataggcggccttccgggcggccagctcttcctcagatacctgcaacatgatggaggcattgggaatgtcgatggcgatggcgtcgccctcctgcaccaggccgatgggaccgccggaagcggcctccgggctgacgtggccgatggacgcgccccggctggcgccggagaaccggccgtcggtgataagggccacggttttgtccagacccatacccgcgagagcggaggtgggattcagcatctcccgcataccagggccgcccttggggccctcgtaccggatcaccaccacgtcgccggggacgatcttaccggcgtagatggcggcgatggcgtcctcctcgctgtcaaacacccgggcgggaccggtgtgggtcagcatctccggggccacggcgctgcgcttcaccacgcagccgtggggggccagattgccccagaggatctgcagtccgccggtgggggagtagggatcctcgatgggccgaatggcgttgtggttgaggttctggaccccctgaatgttctcgcccacggtcttgccggtgacggtcaggcagtccagatccagaagaccgcgcttggccagctccgcctggacagcagggatgccgccggccgcgtacaggtccggcatgtgggtggggcccgcaggggccaggtggcacaggttgggggtcttctcgctgatctcgttgaacagggccaggtccaccgggcagcccgcctcctgggcgatggccagcaggtgcagcaccgtgttggtggagcagcccagggccatgtcgcaggtcagggcgttgcggatgctgcgggcgttgatgatgtcccgtgcgcagatgttccggcggaccatctccatgatggcggcgccggcccggcggcccagctgcagccgcttgctgtacaccgcggggatggtgccgttgcccggcaggccgatgccgatggcctcgcacaggcagttcatggagttggcggtgtacatgccggagcagctgccgcagccgggacagcagttctgggtgcagtcctccagctgctcggcggagatcatgcctgccttgtaggagcccacagcctcgaacatcttggagaggctgacctcctggccgtcgtaggtgccggccagcatggggccgccgctgcacaccacggcgggcacgttcatccgcaccgccgccatcaccatgccggggacgatcttgtcacagttgggcaccagcacacagccgtcaaactggtgagccatgaacatggtctccacactgtcgcagatcagctcccggctggccagggagtacttcatgcccacatggcccatggcgatgccgtcgcacacgccgatggcgggcaccatgaagggggtaccgccggcggcctcgatgccgctttttaccgcgtcggtcagcttgtccaaattcatgtgtccgggaacgatgtcgctgtgggcgctgaccacagcgatcaggggcttctccaggtcctccggcgtgtagcccagggcgtagaaaaggctccggttgggtgcccgctcggcgcccttggtcacattatcactgcgcataggtcttgctttcctcctttttctacccggcccggaggtgttcccgcctccgggccggtgccttgggtcctcttactttttcagccagctcatcatgctgcgcagctgggcgcccaccttctcgatggggtgctcggccgccatgcggcgcatggccaggaagtgggtcttgcggcctccgttggggttcatctccgccaggaattcggaggcgaaggtaccgtcctggatctccttgaggatctgccgcatctccttgcgggtgtcctcggtaatcaggcggctgcgggtgcggtagtcgccgtactcagcggtgttggagatggagtagctcatcttgccgaagccgccctcgttgatgaggtcgatgatgagcttcatctcgtggcaggtctcgaagtaggccatctccggctcgtagccggcctccaccagggtctcgaagccggcctggatcaagccgcagacgccgccgcatagaacggcctgctcgccgaacaggtcggtctcggtctcctccttgaaggtggtctccaggatgccggcgcggccggcgccgatgccggaggcataggcgagagccacttctttggccttgccggtgaagttctgctccacgcagatcaggctgggcacgcccttgccctccaggtactggctgcggaccgtgtggccggggcccttgggagccaccatgatcacgtccacgttggcggggggcacgatggtcttgaagtggatattgaatccgtgggcgaaggccagggtcttgccctcggtcatgtacggggcgatctgcttgttgtagatgtcggcgcacagctcgtcaggcaccagcatcatcacgatgtcgccggccttggcggcctcctccacttccatcacgcggaaattgggacaggtggcggcgaactcctccgccttggcccagtgggaggagcccttccgcaggcccaccaccacgttgacaccgctctcggccaggttctcagaatgggcatggccctgagagccgaagccgatcacggccacggtcttgccgtccagcaggcccaggttgcagtcagtgtcgtaatactttttgattgccatgttcgtgttctccttttctgtttcttgacgatgtgggtgggaatggttttgccgatgggccctgaacagaacggccgaagtgaaagaaaaaagcctttgcctcttgcaagcaagaggcaaaggcttttgaaacaccttcgcggtaccactcttgttaacggtggaagatccttccgccgccatctcagcaggccccaacaggccctgcacggtaacgggtgcgcccggcactgcctatcagagagttctctttcagcaggctactccaggatgatttcaccagatccgacgcttgttgccttgcaccaaccggcaattctctgaaagcggagcgaagcgggctacttgttcccttcatcatattttaggtatgcaaagacggtaacacactgttccgccccctgtcaagagaaacttgcgctcaacttccccgctcccgcaaagttttattggtttgaccaattccatcccttttcaaacgcgaaaccttatgtattttccccacgattttccgccaagcctgtacagggaccggccagaccagcccaaatctttgcgcttagggttcctctttttgttaaatggaaatattttctaaatatttttgatttcaaaggagaagtgccagaaagtctcataacaggcgtttaaaacttgagaaatccgccgaacatgttcttgcgcggacaaaagtcgttgacgcaaagacgcgcccagtattacaatgtggtcgatacaaacacggacggaggccgcggcgcggtcatccgccaagtctggtttttggagggattcaccatgagcattcagaacgagtatctaagcggcctgatggagcgcgtggtccggcggaatccggcagagccggaatttcaccaggcggtccaggaggttctgacctccctggtcccggtggtggaggcgaagccggagtatatcaaagagggcgtcatggactgcctggtagagccggagcggatcatcaagttccgggtgccctgggaggatgaccagggcaacatccacgtgaaccggggcttccgggtgcagttcaacagcgccatcggcccctacaaaggcggcttacggttccacccctccgtgtacgagggcatcatcaagtttctgggctttgagcagatcttcaagaacagcctgaccggcctgcccatcggcggcggcaagggcggcagcgacttcgaccccaagggcaagtccgacgcggaggtcatgcgcttctgccagagcttcatgaccgagctcttcaagtatatcgggccggacaccgacgtgcccgccggcgatatcggcgtgggtgcccgggagatcggttatctcttcggccagtacaagcggctgcgcaacgagttcaccggcgtcctcactggcaagggcctcagctacggcggctctctggcccgaaccgaggccaccggctatggtctgtgctactttgccgacaatatgctcaaggacgcgggccgcagctttgagggcgccaaggtagccatctccggctccggcaatgtggccatctacgcctgcgaaaaggccacggccctgggcgccaaggtggtcaccatgtccgactccaacggctttgtccacgaccccaacggcatcgacctggcgctggtgaagcagctgaaggaggtggagcgcaagcgcatccgggagtatgtgaccgtccgcccggaagcggagtaccacgagggctgctccggcgtgtggcaggtgccctgtgacatcgccctgccttgcgccacccagaacgagctggatctgtccgctgccaaagccctgatccagaacggctgcttcgccgtggccgagggtgccaacatgccctgcactcccgacgcggtggaagccctgcaggctgccggtctcctctttgcccccgccaaggccgccaacgccggcggcgtggccacctccgccctggagatgagccagaattccatgcgcatgtcctggtccttcgaggaggtggacagccatctgaaggacattatgaccaacctttatcacaacgccgcgggcgccgccgcccagtacggcaagcccggcgacctggtggccggcgccaacatcgccggcttcctgaaagtggctgacgccatgctggcctacggtttggtctaaggagggcatctgcatgagcgactatgtttcccgcgtgtccgccgacctccagcagcggtacgccggccagccggagtatctccaggccgttctcacctggctggagatgattgccccggccctggaggacaatcccatctatgagcgggtggacctgctgacccgaatggtggagccggatcgaatgctgaccttcactgtgccctggatggacgatcagggcatggcccacaccaaccacggctaccgggtgcagttcaacagcgccatcggcccctacaagggtgggttgcggttccatccctccgtcaacccctctatcgtgaagttcctgggctttgagcagacctacaaaaacgccctgacggggctgcctatcggcggcgccgccggcggcgcggattttgatccccggggcaagagcagccgggagatcatgcgcttctgccagagcttcatgacagccctgtaccgtctgatcggcgcagacaccgacatccccgccggtgacatcggtgtgggctcccgggagatcggctatctctatggccagtacaagcggctcaccggaaaggcggagagcagcgctcttactggcaagggcctgacctacggcggcagcgtcatccgccaggaggccgccggcttcggcactgtttacttcttggcccggatgctggaacaccagggcgagaccctggagggcaagcgcctggccgtctccggcttcggcaacatgtcctggggcgtgtgccgcaagagcgcggagctgggcggcaaggtggtcaccctctccgggccggacggctatgtctacgatcccgacggcgtctgcacccaggagaagttcgatttcatgctgtccatgcgcgccggcggcgccgacaaggtggagccttacgccgaccgcttcggcgtggagttcttccccggcaaaaggccctgggaagtgccggtggacatcgtgatcccctgcgccacccagaatgagctggacgtggaggatgccgtgatgattgtggccaacaacgtccgctactatgtggaggcggccaatatgcccgccaccgccgaggccctgcgcctcctgcggctgagtcccaagatcctcaccgcaggctccaaggcctccggatccggcggcgtggtggtttccgccctggagatggtccagaacagcctgcggtacagctggacccgccaggaggtggacagccgcctgaagcagatcatgggcggcatctatgatgcctccgccgcggcggcggaggagtacggtctgggatacgacctgattgccggtaatgacatcgccgctttcaagaagatctccacggccatgatcgcccagggactgtgattctccccctcttcaaaacacacaaagcggccgcccttccgggcggccgctttgtcccataaatttcctttgtagtgggaccggcggtccggcagatgccgggccgccggttttgtttcccgtcccacagcgtccagaacagcccgctgatccggccgttctcgtccccattgatccgctccgcggccggtactttcggcagtcccggtatggcccctcacgggacaggtcccgcggggactccgcatttaatccagttgggcaggcccagcccgtccagctcaaggttttgcctccggcaaaacgcttggacgccgctcccgcggcggtatgaccatgcctcagaacagcccgctgatccggccgttctcatccacatcgatccgctccgcggccggtactttcggcaatcccggcatggtcatgatatctcccgtcagggccaccagaaagcctgccccagcggacactttcaggttccggaccgtcacagtgaagccccggggcgctcccagcagggaggggtcgtcggaaaagctgtactgggtcttggccatgcagatgggcagttccccgaaccccagctctgtcagccgccgggcctgcttctgggcggcaggcgtcagtaccacgccgtccgcatggtaaatccgccggcagatagtctccagcttctcttcgatggacccccccagcgcatagctgtaccggaagtcggatggctgctcacacagccggactacctcctctgccaaagcagttccgccggcgccgcccttggcccacacctcgctgagggccacgctcacccccagctcccggcatttctcctctaccagcttcagctccgccgccgtgtccgtggggaacgcattgatggccaccacgcagggcaggccaaatacgtttttgatattgtccacatgctggagcaggttgggcagtccccgctccagggccgctagatcctctctgcccagctccgctctggctgcgccgccgtggtgcttcaatgcccggaccgtggccacgaccaccaccgcgtcgggcttcagccccgccatgcggcacttgatgtccagaaacttctccgcccccagatccgcgccgaagcccgcttccgtgatggcatagtcccccagcttcagagccatccgggtggcggtgacggagttgcagccgtgggcgatgttggcaaagggtccgccgtggatcagggccggagtatgctccagcgtctgaaccagattgggcttcagagcgtccttcagcagggccgccatggcgccggccgccttcaggtcggcagcagtcaccggggcgtcatcataggtgtagcccaccacgatccgccccagacgggctttcagatccgggatgtccgatgccagacacagcacggccatgacctcgctggccacggtgatatcaaatccgtcctcccggggcacaccctgcatccggccccccaggccatccacgatgctgcgcagctgccggtcgttcatatccacacaccgccgccacgtaatccgcttgacgtcgatccccagggcgttaccctgctggatgtggttgtccaacatcgccgccagcaggttgttggccgcgccgatggcgtgaaagtccccggtgaagtggagattgatgtcctccataggcaccacctgggcatagccgccgccggcggcgccgcccttgatgccgaacaccggccccagggagggctcccgcagggccaccacggcatttctgccgatccgccgcagcccgtccgccagccctaccgtagtggtggtcttgccttccccggcaggggtgggggtgatagcggtcaccagaaccagcttaccgtccggccgatttgtctccttcagaaagcggttgtcgatcttggctttgtatctgccgtattgctctatatacgccccatccatcccgcaggcgtccgcaatatccgtgatgggaaggggcttcgcctcctgggcgatctcgatatcgcttttgatggtcatggctgcctcctgttttccgggctgtccgtgtccagacaccctgctgtttcatgttcgattataccggctcccccgggtaaaagcaacagttctctccaaatccccttattttccaaccttttacaggtaaaacaccggcggcacctgctacatagcggtctctgcgtccatgtcctttgttatctgtaaatgtgatagccggttgcataagatccgttctagcagtttctcctccgcagatgctataatattgtacagagaagaaggcgcttatatcttaaaaactgtgcattcagacgaacagaggtgtatgaaaagaggaaagagcacataaggaggtacgtatatggaaactctggagaaaaaaggcaaaggttccgcgttgctcccgttcctgctatttattgtcatctatctaggcgctggcctgtacttccaggcacagggtgtagagatggccttctaccagttcccctctgtcacagccatgttcattgccctgctgctggccttctgccagggcaagggcaccatcgatcagaaattcacagtcttcgccaagggcgccgccaacgagaacgtcctgaccatgctgatgatctacatcctggccggcgccttctccaccgtggccagtgccatgggcggcgtggacgccaccgtgaatctgggtctcagcgtcattcccgtgcacttcctggccgccggcgtgttcgtgatctccgcgttcatgggcaccgccaccggcacctccatgggcaccatcagcgccattgttcctatcgctgtgggcgtggcggaaaagggcgggttgagccttcccctgtttctgggcgcctgcgtgggcggcgccatgttcggcgacaacctctctatgatctccgacaccaccattgccgccacccgcacccagggctgccagctccgggacaagttccgggtgaacttcctcattgccctgccggcggctatcatcaccatcatcgtgctgctggtcgtaggccggcctgagaccgtgacggagatgggaaatctgtctttcaacgtcatcaaggtcattccctacctcgccgtgctggtactggcgctgatcggcatgaatgtgttcctggtgctgaccatcggcatcttcgccgccggcatcatcggcctggcccttggcgatctggatatcccactctttgcccaaagcatctggaacggtttcaccggcatgaacgaggtcttcttcctgtccctgttctgcggcggcatgtctgagatgatcgcccacaacggcggcatcacttggctgatcgaaaagctgggccgcatgatgaagggcaacaagtccgcccaggtgggtgtcgcggctctggtgtccctggcagactgtgccactgccaacaatacggtggccatcattgtcagcggccccatggccaaaaacatgagccgtatccacaaagtggatccccgccgcaccgcctctctgctggacgtgttctcctgtgtgcttcagggcatgatcccctggggcgcccagctgctgactgccgccagcctcaccacgatatacggcgtgaccatgaaccccatagacatcctgccctatatgtggtactgctggattctggccgccgtgggcatcctctccattttcattcccttcgccgacggcatctgccgcaaggacccctggaactgggagtacgatgtggcggagtccggcgtggctgccaagaaggcttctctggagctggagcggcaggagtccgcgcagacgcccatctgacctgcgtgtctcttgctaaaaaaagaccgggcgccctgaggcgcccggtctttttctcctctgtcaggtcccctcctgaagccgcctggtgaaggcgatggaatccgccagcgcctcctccagcaggcggacgaactgctccgtcagcggagagggccggctgctgcggatgtggatccagcccaggtggaccgaggtcttccccagcagcgggatcgtgactacgcttccgtccgccagcccctccgacagcaggccgctgccggaggtgaacgcatcggtggacgccagcacgtacatcgccgtggcccggttgttcacgctgatgcactttgccggctttttcagagagaccatggggtactcctcgaaaaagtccgacgccacgccttggtcgtgctcaaacgccacatacggatatccgtccagttcctcctccgttacgctggagcggccagccagcggatgccccccgcgaacatagatacaggggcagacggcggccagttcgtggaattccagctcccgggcgtccagcagccggcagataatcttctccgtcagatccgtcaggcagatgacgcccacgtccgcccggtggtcatagacgtcgtcaatcacaccgtccatccctgtctcccggaggccaaatcggaagcggttttcaccggcgattcggagcagcctcaaaaacgcgtccactgcaaagggataccgctggcaggaaacggaaaagcgcaccggagccgcggcgttgcgtgcctcaccatacaggctctcgatcccgcgcttctgctccagcagggagacggcgtagctgagaaactccttgccctccggcgtgaactccacgccccggttgctgcgggccagcacccgaatgcccagttcgttctcaagctcccgcaccgccgtggaaatccccgactgggacaggaacagcttctgggccgccttgttgatggagccgcatttggagatctccacgatgtactcaagctgctgaaacgtcatagaaagcctcctcttcccctttcgatctcacttttctattataggcattttgagctggttgtcaaatcgttatcaaaaaaactgtcaacgcatcccgcaaaacgcatattaacagctttgcgccctttgtgctattctataagtagaaccaaacaaaagatatcagttatttgagaaattttctgtttaatatcacctgcgtttttcgatggatgcacagattttccccctctcttctctctatccccgcagccgcgtcagagtctctctgatagcgaaaatttgaataccagtcaattttgcccctgcggagcgtctccggaggggccggtgaagaaaggaagatcgactgtatgaacacggagaaaaagttcggttttgccacgcgtcagatccacgccggccacatggaaaacgcggcgggctccttgtgcgcccccatctatcagacctccaccttcgcattctccaccgtccagcagggcggcgcccggttcgccggcgaggagggcggatatatctacacccgtctgggcaaccccactctgggcgctgttgaggagaagctggcctccctggagggcggcgaggccgccatggccgcggcctccggcatgggcgccatctcctccgccctgtggacctctgtggtggccggggacgagatcgtggcggatgagacgctgtacggctgtacatacgcgctgctgaaccatggcatgaccaagttcggcgtgaaggtcaccctgacggacctgtccgacattgagaacctgaagaagaacctcaccgacaagacccgggtggtgtacttcgagaccccctgcaaccccacgctgaagctgctggacatcgagctgatcgccaagacggcccatgccttcaaccccgacatccgggtgatcgtggacaacaccttctgcacaccgtacctgcagcgtcctctggagctgggcgcggacgtggtggttcacagcgccaccaagtacctcaacggccacggcgacgtgatcgcaggcatcgtggtgggcaaggcggacttcatctcccagtgccggatgttcggcctgaaggatatgaccggcgccgtcctgagtccctttgatgcgttcttgatggcccggggcctgaagaccctggacatccgcatggagcgccactgcgccaacgcccagaaggtggcggcgttcttcaccagccatcccgcggtggccaaggtctattatcccggcctggacaccttccccggtcacgagatcgcggccaagcagatgaagctgcccggcggcatgatctccatcgagctgaaggccgaccgcgccgctgttgccgccgcgctgaacaagctgcagctgtgcaccatcgccgtgtctctgggcgatgcggaaactctggtggagcatcccgccaccatgacccactccacctattctgccgaagagctggcagccgccggcatctccgagggcttggtccgcatcagtgtgggtctggaggatcccgaggatatcatcgacgatttcaagacggttttggatacgctgtaattgatcccgctgcggggccgctcctcctctcctacattgggagcagccccgctttcccgcggatccgcgtacctccttttcgccgtcccggtctttccccaccctgccggaggcggccaaaaaggcccggcttctccgccgggcctttttgtgcttctgtacctgccgcctgttgtgcgtctctcctcccgcggcgggcggcccttgagcaggaaaaagcgccgtgcgcacatgcgcacggcgctttttcctgtttggttcagagaggtaagcgtggggaatgctcagtcctcagccattttgcgatacttggcgtagcggtccttggcgtcctggacggtcttctcgtacaggcgctgggcccggtccgggaagttgatctgcagggaggcatagcggttctcgcccttcagatagtccatcatcttgccgctgtcgggctcgggagaatccagctggaaggggttcttcccctccgcgatccggcggggatcataccggtacagatgccagtagccgcactccaccgccttcttcatctcctcctgcgtgcagctcatgcccgccttgataccgtgctccaggcaggggcagtaagcgatgacgatggccgggccgggataggactctgcctcccggatggccttcagggtctgggcttggtcgtagcccatggccacctgggccacgtagatgtagccgtagctcatggcgatggcgcccaggtcctttttcttgacctccttgccgccggcggcgaacttggccactgccgcagtgggcgtcgccttggaggactgtccgccagtgttggagtacacctccgtatccatcaccagcatgttgatgtcccggttctgggccagcacgtggtcaatgccgccgaagccgatgtcgtaagcccagccgtcgccgccgaaggcccacacgctcttcttggtcagatactccttgttctgcaggacaaaggcgccctcctccgtgggctccgccttctccagggcggcgatcagcgcgtcggacacctcccgggtcacggccgggtcctgccacttggcaagatactccccgatctcagatacggccacacccttttccttcagggctttcagccgcagctccacctccccatggatggacccgtgggcccgcaggaagccgtaggcgaactccgcgttgtcctcgaacagggactgctcccagcagggtccaaagccccggctgtcgcaggagtagggcgtcatgggcatggcaccgccgtaggcggaggagcagccggaggcgttggccacgtacatgcggctgccgaacagctgggtcaccagcttgatgtaggtggtctccgcgcagcccgcgcaggcggcggagaactggaagtagggcttggcgaactgggccgtcttcacgctcttgtcgctgataatgtccttcttcagcagcttctcgttcatcgcgtagttgtcgaagttgggctgctgctccctctgggtctcgaagggcaccatctccagcgcccccttggccgggcaggcggtcaggcacacgccgcagcccaggcagtcgtagggagagacctgcatccggaaggaataggcaggggcgtccttgcccaggcccttggcgggcacggtgacgaaggattccggcgcaccggccttctcctcctccgtcagcagcacgggccggatggccgcgtggggacacgccatggcacagcggttgcactggatgcacacgtcgggattccactggggcaccgtgacagccacgccccgcttggagtatgcggtggtgccattctcccaggtgccgtccaggcagttgtgcctcttgaacagggacaccggcagcttgtcgccgtgctggcggtccatgggcaccacgatctccttgacgaagtccgtgcccttcagctcctccggcgcgccgtccttggcgtccgcccaggcggcggggacctccaccttcgtcatgccggtcagacccacgtccacagcccggttgttcaggtccacgatctcctggccgccctttttgaagtaggagttgtagttgccctgcttcatctcctccaccgccaggtcgatggggatcaccttggtcagctggaagaaggccgcctggagaatcgtgttgatccggttgcccaggcccaggtcccgagccagcttcgtggcgtccatgatgtagaagttggcgtgcttgttggccaggtcccgcttcatcttggcgggcagccgctcctccagctcctccgcgctccagggacagttcagcaggtatgtgccgccgtccttgaggtccgcggtggtgtcatatttgtccacataggtgggcgcgtggacgcccacgaagtccgccgcggataccagatacgtggcgtgaatgggctggtcgccgaaccgcaggtggctctgggtcagaccgccggacttcatggaatcgtaggagaaatacgcctgggcgtacttgtctgccgccaggccgatggtggtgatggcgttcttgttggcgcccaccgtgccgtcgccgcccaggccccagatcttgcaggatacctgtccgggatagtccagggcgatctcctcataaggcaaggaggtgaaggtcacgtcgtcctcgatgccgatggtgaagctgttcttgggctcctccttggccaggttgtcgtacaccgccacgatctggccgggcgtggtgtccttggaggccaggccgtaccgaccgcccaccaccacgatgtccttccgccccgcctgctgcagggcgctctgcacatccagatacagcggctcacccacggagccggactccttcgtccggtccagcacggcgatcttcttgcaggtggcggggatcgcatccacaaaatgccggatggagaaggggcggtacaggtgcacctgcaccatgcccaccttgcggcccttcctgttcagatagtccaccgtgtccttcaccgtctccgcaccggagcacatgatgacgatgacttcctccgcatcgggcgcgccgtagtagttgaacagcttgtaatcccggccggtgagcttgttgatctcatccatgtagtgctggaccacgccggggatcgtggcgatcttctcgttggcgccctccttgcactggaagaacacgtccggattcaccgtcgtgccccgggtggaggggtgctccgggttcaggccgttcttgcggaacgccgccagctggtcatagtccaccagcttggccaggtcgtcatagtccagcgcctcgatccgctgcatctcgtgggaggtgcggaagccgtcgaagcagtgcatgaaggcataccggccgccgatggcggacaggtgggccaccgcgcccaggtccatggcctcctggggggaggaggacatcagcatgccgaagccggtcattcggcaggtcatcacgtcggagtggtcgccgaagatggacagggcgtgggcactgacagtccggcaggagatgtggaacacgccgggcaggaactcgccgccgatcttgtacataggcgggatcatcagcagcaggccctgagaggccgtgtaggtggtggtcagcgcgcccgcctgcagggatccgtggcaggtgcctgcggcccccgcctcggactgcatctcaatgacctccacgggttttccgaagatgttggtcctccccttggcggaccactcgtccaccttctccgccatcacggaagatggcgtgatggggaagatggccgccacctctgtgaacgcgtaggacgcgtacgccgcggcggtgttaccatccattactactagttttttcttagccatgtctcctgttttcctttcgatctcacttggtctgttctcattgcctcaacaccgtccgctgcccgctccggggcagcggacggcactccagggagcttactttataccgggataggcccgggccacatagtcggcaatcctgcgcaccgcctccttcaggttttcgtcggagttggcgaataccagccgcagatagccctcgcccatgtcgccgaaggcggagccgggcaccgtcaccactcctgcgttctccagcagctcctccgcaaacgcttgggaggtcttgccgaatgccttgatgttggggaaggcgtagaagctgcccgcggacttcttgcaggtgatgccggggatagcgttgagtccgtccaccagaatgtcccggcggcgggtgtagtccgccaccatctggtccacgcacgccgtgctcttcagggcctccaccgccgccgcctgggtgaaggtggacacacaggaggccaccccctcctgcagctgcgccattttcttgatgtaccccggctccggcgctaccagatagccgatccgccagccggtcatggcataggacttggagaagctgttcagcaccatcacgcggtcctgcatctcgggcacctgggccatgctgtacggctggatgccgtcgtatacgatggcgtcatagggctcgtctgtcagcacccacaggtcatgggtcttcgccaccttggcgatggccaggatgtcctccttcgtcagcaccgcgccggtgggattgcagggggagttcagcaggatcgcccgggtccggggtgtgacggccttttcgatatccgccgcttggatccggtagtcatattcctcatacgtggggacgggcaccgctctggcgccgatgctgctggcctgcccgtagtagttggggaagcagggatccggcaccaggatttcatcgcccgggtccagcagcgtcatcatggccaggaacaagccctccatggcccccacggtgatgatgacgtggtctttggtatagccctcccagtactgcttccggtacttggcggccacagcctcccgcagctctgtggtgccggcgttgggcgcgtaatgggtctgcccctcgtccagggctctcttcgccgcgtccttgatgtactggggcgtgtcgaagttgggttcgcccaccgtcagcttgatcgcctccgggtattgggccgccagatcaaacatctttcggatgccggacgctggatactgcttcgcccgctgggaaatgcgcagttcctgttccattggtaacatctccttttgatcatcttctcacgcgcacccggcgcacccgttccgaaagcgggcacgccgaatgcgcagcaggcagttccttacttcgcagccttgtcgttcacccacagctccgggatggcgttggccgccgcctcactggtgggctcccacttgccggacttcagccgggtcaggtaatcgttgatcagtgcgccgatctgcttgcgcatcaggaagcagaccaccaggttacacacggcgcacacaccgaagaagaagtcgaagagattccacagcacactgagggcgcccacagagccgatgatggcgaaggcgcagcccaggagccggtagggcagaatgaacttcttgccgcccaggacggtcatgcagatctcaccgtagtacacattgaccagcgcggtggtgaaggcaaagaaggtgatgatggccaccacgaacaccgtgccagcgatggcgttgccgaaaccggcgccgaaagcagtggcggtcagggccgcgccggtgccgccctcggtccacacgccggtgcacaggaccaccagagcggtcatggtgcagacgatgatggtgtccacgaacacctcgctgatgccccacaggccctgcttcaccggatggttggcggaagaggaggagtgggccagcggcgccatgccggtgccggcctcattggagtacacgccgcgggccaggccccaacggatggccagcatcacggtggagccggcaaagccgccggtggcagccataggcgtaaaggcgtactcaaaaatcatcgcaaagacgtgcgggatgttgctgccgaactttaccagaataaagatgctgccgatcacataggccagcgccatcagggggaccaccttctccgcaaaggaggagatactcttgatgccgcccaccagcacaacggccatgatgacggcaaagatcacgcccacgatccagccgggaacgtcaaaggagacccgaatcgcctccaccacagagttggcctgcacggcgggcgcaaacaccatggcgcagcccaggatcacagcccagaaaatgcccagccacttccagctcttgcccagcccccggcgcacataccaatagaagccaccgtgccatctgccggtctcaggatcccgctcccggtaggccatgcccagggtgatctcggaaaacttcacgatgaagcccatgagggccacggcccacatccagaatacggcgccagggccgccggtggcgatggccaccgatacaccggcgatgttccccacgccaagcgtggaggccagcgccgtgcagcaggcctggaacggggaaatatcgccctcgccgtcgcccttgtcgaagatcttgccgaacgtgttcttcatggcgtgtccgaacctggtgaattggaagaacttaaagcggacggacagatacacggcgactgcggatgtcaggatcagaagcggccatccccacagccagttggaaatcgccatcatgatgtcgatgataaacatattctacctcccaaataacttcatgcgctccattttcgattggctgaatcatctgtcgggaagtctttccccgcggcttccccggctcctcctttcctcctatattcgatatgcggccagccgcataacttgcctgatttccaataattccgtatggtggaagcgaattcctttgggtagaattgtcaaagctgccggtcttttctggacatgtatccaaaaaagcggcagcttttccgtagaacgggatcattttccaaaattgtgtcaaaaaccaaagccgcaactgcggcccgacacgaagcatttccacggaaaattacggatcctgttttctttccttatgatttatgatattatatagacaaacatttgtcaaggcagaatgtttctatgatatcgccaaaaaggagcggccgatttatggcaaaagaacaggtatccagcatcctccgcgccctggagattttggagtgcttcatggataacgagacggaatggacgttgaagcgcctggtggcacagctggatctgcccaccaccactgtccaccgccagctctccaccctcacggaccggggttatctggtccaggatcccgtccgcaagagctaccgggtggggccacgcctcctgctgctctccagcaccgtcctcagccactccgatctgcgcagtaccgcccggccggagctggaaaagctgtccgccactgtgaaggagaccatcaacctcagcgtgatgctggaccgggagatcttttatctggacaaagtggagaccttccgctccgtggtgtgcaacacgaaagtgggcacccgagccccggcccacgccaccagcggcggcaagatcatgctggcctttcacgatcccgattatgtggacgcctactgccgggacctgccccagatgcagcggctgacggaccgcaccgtcttctccccggacctgctgcgggagcagctggcccaggcccggatcaacggcttcgccattgacgacggggagatcgaacccggcctgatctgcgtgggcgcccccatcttcggtctggaccagacggtggtggcggcggtcagcatcgccggtcccaccttccgtatgaaagaagagctggacgtgatgactcgtgccgtgaaggccactgccgccaacatctcccgcctgatgggcgggcggccgtgacgcggcctgttttccagctgtcaggagcgggagcccataaggactcccgctcctgctgcttttacttccgcttccggaacagctccggcagtctccagccacggccctttccccgctccgtggcccgcatctggggaggatggtccagatagaactgctggacggaaaccggcaccgcgccggcctgctccgcccggacaaagcccccgtccggcagcatccgccgggccttcacattgtctcccagaagccgggccagatagtccgagaggaagtcctgcacctcccggctctccaccgggcaggcgatctccacccgccgctcctgatttcgggtcatgatgtccgcagaggataagtacatctgccgcagggcaccctccccgaagcagtagatgcgggagtgctccagaaactcccccacgatgctggtcacggtgatatggtccgtcttgcccggcacgccgggcaccaggcagcagatgccccggacgatcaggtccacccgcactcctgcctgggaggcctccgccagcttgtcgatcagctcccgctccgtgacggcgttggtcttcaggataatccgcccccggtcgccccgggcgatctccccgtcgatgagccgtaacagcgtctgcttcagggacaccggcgccaccagcagcttaccgtagctgccccgcaaatcgccgatcagcatattctggaaaaaggccacgccatcggcggcaatggtccgatccgccgtcaacagggagaagtctgtgtacagcgccgcggtcttttcgttgtaattgcccgtgccgatctgagtcacatagctgagccccgtcttctcctttcgggtgatgaggcagatcttgccgtggcacttatagccggcgggtccgtaaatcacccggcacccggcctcctccagctcccgggcccaggtgatgttgttgccctcgtcaaagcgggcccgcagctccaccagcaccgtcacggccttgccgttctccgccgcggcgcacaggtgcttgatgacggcggacttccccgccacccggtaaatggtcatctggatggacaccaccgccgggtccgcggcgctctggcgcagcaggtccagaaacggctgcatggagtggtagggatagaacagcagcacgtcccgctggcggatctgctcccacatgggcacctcccggtccagccaggcgggatatgccggcgcgtggggcgggtaaaagagggcgctgtccagactgtccagctggtaggcgtatttcagaaccagcgggcaggtgcacacatagctctgctccgccgtcagcctcagccgccggagcagcatggcctgcagagccggggcctccccctgcatctccagccgcaccggggccagccgctcccgctggcgcagcagcttggtcatctgggcgcgcaggtccaggtcctcctggtccatagcctcatcatagctgatgtctgcgttccgggtgacggacaccaccgcctgctcctcgatctgatagatcttgaagatcttccgcaggtggtgggccagaatgtcctccgtccgcacgaaggcgccgggccgggccggcagaggcaggatgggcggcaccacatccggcacccccacgatgcccagccgccgcttgtctccctcccgcagcagggcggcggcatacagggtcttgttcttcaggtggggaaaggggtggctggggtcgatgatctggggcatcagcaacgggcgcatggcctcccggtaccaggcccgcacatactcccgctcaccatttttcagctccttgtaggggatatccgccaccccatgttccgccagggcctccatcagctcccggtatacctggtcccgctgccggaccagcggcaccacggcggcatagatccgccgcagctgttccgccggggagaacccgcccttgttttcccgggcgttcggggccactagggctaggtccgtcaggcttcccacccgcaccatgaagaactcgtccaggttgctggtgaagatggagagaaagcgcagacgctccatcagcggcacagaggggtccgccgcctcctccagcacccgctggtcaaaggccagccaactgagttcccggttctgggtgtaactcaggtcccagcgttcagcagcttgtgacacagatatccctccctgacgccgtagggactgatatacagctctccttcgcacagcgcctctgtcagtgcatccatcagcacgatgcccggcagaatcgtgtgcacccggtccgggcagtgccgcaggatcagcttccgcgcctggtggtcccgcttcaacagcagctttgtcagccggcggacctccgcaggcgtcaggatgcggtttcccgccggcttttcataccagtcattggcgattttcagcgccgcccgggccgtgccgcccacgccgcagacccgttccgcccggtgcgccggcagccgggcctccttcagggccgcggccacggtgctgcggatccgctccagctcctttttcttgggccacaggccgtccacgcagcgattgaacagctccagggatccgatgggcaggctctgggcctttttgacctccccggcccggacctccaggacctctgcgctgccgccgccaatgtcgaacatggcgccgtcctgcaagtccgtggccgtccgggcgccgtagtagcccagtctggcctccagctcgccggagatcacatccacccccacgccggtggccgcccgaatctgctccactgcctcctccgtgttgcggatgttccgcagggaggcggtggcaaatacgtggggggcgtccagatcaaactgccgcagcagcgcctgaaagtcccggatggccccgcaggcccgctggattccctccggagagagcacccctccgtggacgtagctgaccagtcccgccatctccttttcggaaaacagcaggtcgaatccgccctccggcagggtgttgtagacggacagtcggatggtgttggaccccaggtccacaatggcgaatttcatgggtatgacgctccttcttcccgcgctccccactgggatgcggcgtttcacgtttatcagattgacagaggcagatgaaattcaaaagcgcggtgctgtaaaatgccggtaaaattcaggctttttcgatggctctggccacagcggccagggcctgggcctccgtgtcgtcaaaaaggtgggtgtagatgttgctggtgacggtcatggagctgtgccccagggtgcgggagatatcgaacatgggcacgccctggctgttggccaccgaggcaaagctgtgccgcaggccgtggagggagatcttgggcagcccctgccgccgcaccaccgtcagcaggtcccgggtcagctggtccggcttggggggcgccccgtcctgccgcagcaccacccactccttcgggtcgtcgctgcgccgcctctcccacgcccgccgcagcacctgctgcaggtcctggagcccggtgatgcccagccgccgggcggaggtgcgggtcttgggggacttcagcaccacgctgccgcccacctctgtgcgcacctcccggatggagagcagccccgcctccaggtccacattctcccaccgcaggccgcagatctcgctgcgccgcaggcccagataggccgccagcttcaccggcagctccatcatcgtgccggacacggcggagaacagcagctgcagctgctccggggagtaaaagctgaagcgggcctccttcttcttgggcggcgtcacccggtccatggggctgcgttccagcatctccagccgcaccgccatgcccagggccgtggtcagcatcacatagtgcttgatgaccgtgttgggggacaggccctggttcatcttctcatagagatagccctggatacgcaggggcgtcagctccgccagagggatccttcccagggcaggcagcacatgacagcgtgccatgttgcggtaggcgtacagcgtgctctccgcccggtcccgggccaccacctcctccagccagaaggtcagccactcccccagtgtgcagtccttccccggcaggcgccggtcggcacaggagttcccctccagcgcggcctgggcctcctccctggtgcggtaggtgcgggtatagcgccgtccgtcctgccggaacaccgcgtaatacagctgccgctccgtgtcgtatgcaagattcttctggatcgtctttctgggcatgggtgcattcctctctctttctctctcgttttgcgatgcagacgcatcgcaaaagggccgtgtgccgccgaccacggcgcggcctgaaatttcagcgcacggaccgggacagcccacatgcgcgaaaacttcatgcgccgccggggcagctgattttcgcggcgccccactgcccatgaagttttatgcccttttatcataaacaactcacgctgtccaataggatacccatattcggtcagacaaaacacaattattgtaaatttccgggcccgctccggccctctattcatgtagggccggggcgaatgccccttctgccgcaggctttttcacggcctgcgggacaaaaaagcggctgcctgcggcagccgctctccaagagccgattcacttcgcgtccttcactcccatccggcaggcggcccacaccgcgttgtggtccgagagctcctcccccgcaaagcgagccagggcggagtccggccgggcaaagccacagtccgccgtccgggtagaaagggtgcggctcttggtgggtgtcatcccccgcagcagcagccagtccagccgcaggcccaggcatccgccgcccggcaggggcttgcgccgggttaaaatgggcgtctccggcactgcccggtagcccatggcctccgccgccgtcagggcagcctcatactgcgccacgtcttccagacagcggcgctggagtgccggactccccgcgatctcccggatggcgtccttgtcccggccgtcaaaggtgttggtgttcagatctccccccagcactaccggaatgccgggaagcagttcctccgccgcacggagcaccgcctccagctggagccgccgtccctcgccatgggtgcggttctccaggtggatggaggccacgcccagaggccgaccgcccacatccagctccgccagcaccgcgcatcgcccgccaatccggcgctggcggtcgaagtaccagttgtactgctccggcagccgcacggtccacgcccgccggatgggccagcgggagaacaccgcatttccgtggaagcccttggggtcctccccattcaccagctcgatgaactccaggccgtaggcgtagttccagccgaaccgctccgccagctcccgcgcggtgttccggccgccagagcggacgcagccatcatccagctcattggccagcaccacatccaggggccggacgcccgggcagtcctgaagaaagtcgcccagctcctccaggtggacgccccgctccatattgaacaccagcaggcccagctcctccggcacctccgccggggccggcaccggtgcgccgatctccgtctccgaaaactgggggatcatggccatcaccgtctcctgcgtctcgtggtccagcagcgcacccaggcgctggcgctccgtattggggatacccttcatagtgtccttcctccttgtgttctgggggcgcaggtggagcggaccaccagctccggctggagcaggtccgctgtcggccgccggtccccctgaatctggcacagcagccgctccacggcgatgcgtccctgctgaaatttatgctgcgaaacagtggtcagatggatacggggaatggcggcgtaggagacgttgtcataccccaccagggacaggtcctccggcacccggatcccccgctcttccgccgcctccaaaattctgagggcggtcaggtctgaaaatgccagcacggcgtggggcagcgtccgctccccgaacagtgccaacgcctgttcataggcccactggcgcagttcccgggtgtccggcggcgcgggcagcacccggccggagagcccgtgctctctcagcgcccggcgaaagccccgcacccgctgcacacgggtgagagagtccgcacgcccacccaaaaacaccaggtcccggtggcccagctgcagcagataccggacggcgatggccgcccccgcctcattgtccgccatcacatagctgcacttctccccgtggttcacgcccaggtacacgcagggggtgccctccagcaggtcggcgtgcttggcctggctctcccgggacaggggcgagatcagcacgccgtcgatctgccgggccagaaagttctcgatggctcgaagctcccgtccctcctcctggagggagttgctcaacagcacccggtacccgttttccgctgccgtctcctcaatggcagtggcgatgcccgtgaagtaggggttggacacgtccggcaccactacccccagagtgtgggtggcctgccccgtgagccccttggcggcggcgttgggcacgtatcccagctgggcacaggcggcccggacccgttccttggtctctgcgctgatctccgggcggtcgtccagagtccgggacacagtggccgggctgaccccggccagcgctgccacgtccttaatggtcgtccgccgcatcccgttctccctcctatttgtgcaaacgtttccaatagcacctttaagataccattccggcagggaaactgtcaagtttcttcgtctgttttaccatgtttttgtgggtttttaatatattttctccagtatcttccggaacggcattctggtataatgcttctatgaaaaaagctgcacagcagaaggaggacttttatggcccgcatgaccatcagggacattgcccggctggccggggtctccgtcaccaccgtttcccgggcgctgaacaatgcgccggagatcaactcccagacccgggagcgcgtgctccaggtgtgccgggaacagggctaccgctccaacctgctggctcggagcctagtctccagccggacccgtgtgctgggcgtcattctgccggagctctccggcccttttcacgcctccatcgtgctgcacctggagcgctacgcccaggaacaggactaccagatcatgttgtgctgcggccgggtagggggcagcgaaaccgccgccctgttcgactttctggtaagtcaccgggtggacggcattctgctggtcagtgccagcagcgccgcgcccgatctgctgcggcgccacgcacgggggacgccctccgtgctgctgggggatgtgtccccgaccgctacgctccagcggatcaacgctgtcagcaccgacaactatgtaggcggcgccatggcggccggatacctctcccggctggggcaccggcgggtgctgtatctgggcccccggcgggacagcgtcacccatgtgctccggcaccagggctttctcaccatcgccagggagcggggcatggaggtggagaccgtcttcaaccccggcgccgtctcctccgcccccaacggctaccggctggccaggcaggtgttcgcccgccccttcccgcagacggcggtcttcgctccctctgacgccatggccctgggtgtcctccaggcggcagacgagctgggactggacattcccggccggatctccctgctgggctatgacgatatcgaatacgcctccctgccgaaaatccgcctcagcactctggcccagcccaccggggccctggcagagagcgctgtgcggctgctgctggagctgatcgactccggcgggccgggggaggtcacccacaagctgatcgccccccggctggtagagcgcaacacctgctgctctccgcagcagaggactgcggtctagcggcccgggcatccgaacaaaacaagcccccggcttttcagccgggggctcgcttatactgctcagggaagatagttcagcgggttgcgggccacgccgttgtaacggacctcgaagtggcagtgattgccggtggagttgccggtggagcccacccgtgcgatctgctggcccttgtagacgtggtcgcccacggagaccgtcaggctgctgttgtgaccgtaccgggtcacatagccgttaccgtggttgatctccaccaggtagccgtagccgcccatccagccggagtaggtgactgtgccgccgtccgccgcgtagaccggcgtgccgtacggcccggcaatatcgatgccctgatggttggtggagccaatgccgccgggagaggaccgtccgccgaagcgggaggtgatccggccactgatgggccaccggaacgtgccggtgggcagccaggtgggccgctccttcgtgccctggagccgctgctccgtcacgggctccttcagggtgacagaggagaggatcgtccgctccgtctccacaccgttgacataggtgacgttggccaccacgtcggcggcgccgtactcaccgggggaagtcacctgatagtcgcccttgtacagataggcagagtccgtatactccacatcatacatgacgtcttccacgtagtattcccgctgcttcactgtcactgtaagataggggacggcctccgacagcgtcagcacctcgccgatctggatcttgtcgatgttgtagccggggttcagcgccagcagttccttggaggtcattccgtgatcctccgcgatctcggaccaggtgtcacccgccttcacggtgtacgtggtctcagcggtcttcgtgctgtacagcagctccgccagataccccaggttcatcaccttttccgtgggcacgtactcctgcttgatctccacatcctccgcaaattcgcaggagatggtgttctcgtccgcggtgctgctctggagctggctcagcagctcctccagtgcgccctcatagggggtcgcgcccaccagctcaccgtccacatacagactgtacgcctgggtgaccagaccgatctgctgggacaggtcctcctccagcgtcgtctcgtctaccacgtcctgccgcagcagcaggccggaggaatactgcagcagggagtcgtcgatggtgtagctctcccccagcgtccgggcggtgaccgcctccaggtccgacgcggcctcctccgctgcggattgggagcccacagcggcaatcacctcgccgtcgtacaaaaccgtcgtcccgaaggtgtagacggagaagaacaacccgatggcagcagccacgcagccgccgcacagcagcatcgctggatgcaggcgccagcggtgccccagcttggcccgcagggcagagacccgctcacgccgctgcttccggctggcgcggatccgttcgcccagcagccccccagagtgggcagcattccccaggccagcagaagcaactgcacaggaagccgctcagactccgggaaccgctttgcctttttctcccgtaccagacgccgccagtggcggcgggtattcttggccttttccgccagcgcctggcagccggtcaccacagggctgatctccccctccgtgtcctgccaggactgcacagcctgccgcagcctccggcgccggggctctgtccgtcgggacggaccagcgggctcctctccccactcggggatcaagggcttcaccgccgtcggtgcggatacgggctccggctgcacctccgggggcgtgggcggacacttcctctcccgctccgcctgtccagcagccagacgcttgccgccgcggcgggactgccgggcggcatgatcgcttttctgaatatgttcgctcatatcgtctccgtaaaatccagcgaaatagttacaatttgttaccgtttgtaatcatacgccatttcccgcttccagtcaagtctaaaattgttaaaaaagttcttcaatttcttgtgtttccatcaatttccgcaccacagcatctggtagggtcccacacttttgccagaagcgccctcccgccggacacaaatttttgtgatgatattttgattttccaattgaccccgacggcgagttgtgtataatgagaatagtctaaatacgttcccaaatctgtacgtttttggaggaaatcagagatgtttgaatttttgatcaaaaagctgaaggcccatccccggaagattgtcttcactgagggcacggatccccgcattctggaggcgtccgcccgcttgctgtccggtaccttcctgacccctgtgctggtgggcaatctcgacgagatccaggccgctgccgaggaagccggcttcaacatccggggcgctgagatcattgatcccgaggccttccccgacatggagaagatggtctccaccctggtggagctgcgcaagggcaagatgagtgaggaggagtgccgcaagctcctcaagcaggccaactacttcggcaccatgctggtgaagatgggctatgccgacgctctgctgggcggcgccacctattccaccgccgacacggtccgtcccgccctgcagatcatcaagaccaagcccggcaacaagatcgtgtcctcctgcttcattctggtccgtccctctgccaccggcgaccgcgaggttctggccatgggcgactgcgccatcaacatcaagcccaccgaggatgagctggtggagatcggcctggagaccgccaccaccgccaaggtcttcggcatcgatcccaaggtggcttacctcagctattccaccctgggttccggcaagggcgaggatgtggacaagatgcgcaatgcctgcagcagactcaaggccctggcccccgatctggatgtggacggcgagctgcagttcgacgccgccgtctctccccgcgtggcccgcaccaagtgccctgactccaaggtggccggccatgccaacaccttcatcttcccggacatcaacgccggcaatatcggctacaagatcgcccagcgtctgggttcctttgaggcttacggccccatcctgcagggtctgaacgcccccatcaacgatctgtcccggggctgcaacgcccaggaggtctactccatggccatcatcactgccggcctgtgcgaggactgattgccgtacatcccattttccatacagcagacagcggcggacgctttcgcggtccgccgctgtttttttgttcattgcaaccggcggttgcggaatcgccaagggaccttgatggacaatcccgccgccctctgctatgatggtcgcagaattgaagcgggaggcgagaccatgaccttgggagaacggctgattcagctgcgggcaaaagcagggctcagtcaggataccctggcggagcagctgggagtatcccggcagtctgtcagcaagtgggaaaacgacgccagcgtaccggatttggagaagttggtgaaactgagtggagtgttcggcgtatctctggatgaactggtgaagggagaggtcccggattcggcggcccccgccgtaaaggccggcgtgacggcagaggaacttcggctccaccggcagaggctggtggggatcgcgttttttctttccgccgtggtgctctattcctatgcgctaaccgggccaatcgcggtgtggccgctactcatgtgcggaaccgcctgtttgttccgcaggaagtttttagccatcatctgcagctggggtgtatggctggcgcttttttcgatttttggccccagtttgatgtggcttccttccggcaactctgtcacctggatggccgccttctggctgaccattgcgttgttgttcctgacggttcaaaccattcgccgtcccccgcccgtccctgtttgctggctgcttctggtcgcctttgcgctccaatatgccggtacccgcagcatttggacgtccatccatcgtccgggtctgctccagttctttctgcttcgtcctggtggaaagttcctgatactgtattggttggtgatgcttcttctggtgtccgtccataccatacgagaattcgttgtttcccaccggcattccaccgggaatctatccaaatcgtaaatttttttgcaataattccttttcgtattaaaaacaaagccgccctgtcgggcggctttgcgctttgctttcgctgcttacttcaggttgaagaacgccttcatgccaggatactgcgccacgtcgcccagctcctcctcgatgcggagcagctggttgtacttagccacccggtcggtgcggctgggggcgccggtcttgatctggcccgcgttgacggccacggcgatgtcggcgatggtggcgtcctcggtctcgccggagcggtgggacacgatggcggtgtagccggcccggttggccatctggatggcgtccagggtctcggtcagggtgccgatctggttgaccttgataaggatggcgttgcccacctgcttctcaatgccggtggccagacgctccacgttggtgacgaacaggtcgtcgcccaccagctggacccgatcgccgatggccttggtcagcatggcccagccctcccagtcggtctcggccatgccgtcctccagggagatgatgggatagttgtcggcaaacttcttccacatgttcaccagctgctgctgggtcagcttcttgccggacttgggctggacatagcacttctgctcctcgtcccaccactcggaggaggcggcgtcgatggcgatcttgaagtcctcgccgggcttgtagcccgcggcctcgatggcctggacaatgaccttcagggcgtcctcatccttcttcagattgggggcgtagccgccctcgtcgcccacaccggcagcgggagtgccgttctccttcagcacagccttcagggcgtgaaacacttcggcacagcggcgcagggcctcccggaaggagggggcggagacaggcataatcatgaactcctggatctccacattgttggtggcgtgggcgccgccgttgaggatgttcatcataggcacgggcagctgcttggcgttgacgccgccgatatagctgtacaggctggcgcccaggctctcggccgccgccttggcgcaggccagggacgcgcccaggatggcgttggcacccaggcgagacttgttgggggtgccgtccaggtcgatcagggccttgtcgatggaggtctgatccaggacattcatgccgatcaggcactcggcgatctcggtgttgacgttctccacagccttttccacgcccttgccgttgtagcggcccttgtcgccgtcccgcagctcgcaggcctcatagataccggtggaagcgccggagggcacggcggcgcggcccatggtgccgtcctccaaatagacctccacttccacagtggggttgccccggctgtctaggatctcccggcccaggacgtcgacaatctcaatgatctgcttcatagaactcgtactcctttattaaaattataagacagaatcatgcgggcgcgttcctcccaagggagggcccaccagggatttccggtgctattatatcggtaatcgtttactctgtcaagcaaaccggatatttccagtgaaaaaagtgcgcactcctgtcacagaaggacggcgctgctgagaatctcaaaggcctcctgacagggcaggcgctttttctccatgggcggcaggctgtcgtcaaaccggcgggcttccgcttcgtcaaacacaaacgccgggctctggcggtatatccagctttttcccgccagggtgccgggctccagttccttcaccagcatcgcggcgggatacgtcccgtcctccagatggacccggtgctttttgcagctttggaagccgcggcccacgtagttgttgggatcgccgaagatcacaatagcctcgtaccccatggcggacgcccgccggaaggactcctccatcagcagcctgccatagccccggcgctgcagtcccggtcggatacagactggtccaaaggtcaggatgcccttctccttccctgcctcgtccaccagtgtgctcttcgtgtacatgatattgccgaccacacggccgtccagctccagcaccaggtccaactccggcagaaaatccgggtggggccggatggcgtgggccaggtagtgctccgtgcatcctggcgtgtagaggttgtaaaacgcctgccggatgatgtcctccacctgctggtaatcgctcacccgctccgggcggatcgtgatgttcttctccatatcggttcctccctgcatgaattggcgccctgcgggcgcagtctgcacagcttgtcctgctctctattatatgtctctttcggctgcacgcaatggtgggcagtgatttttttcgtccggagtgaaagctggcgcgaaaaagcgcctcccgcaaaagcgggaggcgccgaatcgaaaactcacaggaggttcatcaggttgaagctcaggatcaggccggagaacacgatggacaccgtggagcacagcttgatgaggatattcagggacgggccggaggtgtccttgaaggggtcgcccaccgtatcgcccacgacggcggccttgtggcactcggagcccttgccgccgtggtggccgccctcaatatacttcttggcgttgtcccaggcaccgccggcgttggacatgaacaccgccatggcaaagccggtgacggacacgccgcccagcaggcccaccacgccggtggggcccagcaccaggccggtagccagaggcacgatgatggccagcagggccggcaccaccatctcatgcagggcgcccttggtgcacagggacacgcaggaggcatagtccgggtctgccttgtactccatgatgcccgcgatctccttgaactggcggcggacctccaccacgatggactgggccgccttctgcaccgcgctcatggtgaaggcggagaagacgaaggtcagcatggcgccgatgaacatgcccaccagcaccgtggggctggtcagggtgaagttcagcatctcctccgtgttctcctggacgatgttcacgtagctgaccagcagggccagggctgtcagggaggcggagccgatggcgaagcccttgccggtggcggcggtggtgttgcccagagagtccagtgcgtcggtccgctcccggacgctctccggcaggccgctcatctccgcgatgccgccggcgttatctgccacggggccgtaggcgtccgtagccagggtgatgcccagggtggacagcatacccacgccggcgatgccgatgccgtacaggccctggttgaaggccgcagtaaaggcgccggcctcatccacgatctccatgctgccgccggcggcgaagtagctgaccagcaccgcagccgccacgatcaggatggaggtcagagtggacttcagacccagggagatgccgccgatgatgatggtggcggagccggtctcggaggcggccgccagctcctgagtgggcttataggtatcagaggtgtaatactcggtgaagtagccgatggcgcagccgccgatcagaccgcagaggatggccacataaacgcccatgtgcccatccagaatgaaataggtcaggggcgccgccaggatggcggagagaacagcggcggtgtaagtgccggtccgcaggctcttcagcagggactgctgggtggcgttctccttagtcttcaccaggaaggagccgatgatggagcagatgatgccgcacacggccagggccacgggcagcagcaggccgccccagccgtagccgcccacagcgcccaaggcgaaggttgccaggatagagcccacatagctctcatacaggtccgcgcccatgccggccacatcgcccacgttgtcgcccacattgtcggcgatggtggcggggttccggggatcgtcctcggggattccggcctcaactttgcccaccaggtcggcgcccacgtcggcggccttggtgtagatgccgccgcccacacgggcgaacagagccatgaaggaggcgcccatgccgttcatcaccatgatattgcccagggacaccggatcattgatgccgaaggcatagcgcagcaggaaaaaccagatcgtgatgtccagcattcccaggcccaccacggtgaagcccatgacggaaccggaggagaacgccacccgcaggcccttgttcaggctctcggaggccgcctgggccgtccgggcattggagtttgtggcgatcttcatgccgatgaagcccgccagcatggaccagatgccgccggtgaggaacgcgaagggggtgaactgcgagagcatcttcccgccggaaccgaaagcaataatcagcaggaggatgaacaccaccagaaacaccttgaacactgtggtgtactggtgcttcagataggcgtttgcgccctcacggatggaggcggcgatcttccgcatcttctcgttcccctccgagaaggacatcacgcggctgcgctgcagccacgcgaagagcagtgcgatagccgccccgacaaatccgatccagaaaaggtcttccatgtttctccgctcctttgcagttgtatttgtatacggtacgtatattttaacatagcccggaaatttttcaagaaaatattaggtaattttgcgtgcagacagctacgttttcgcgttttccacaaagttcctgttttttggctcccacttttcattcatttgggcagattgcctctttacaggacgcctgacctgaaatccggcgaatttttttgtgaaaaatgccctcaaaccgcagtctgagggccgtatacagcaatatggttctgattttgagctgcaacccatccagctctgctcaatagatcaagtggaaatcggtgaagacccagcggtcttccagaaattcataggggaatgcataggactccacccctgtcacggtagagccgccgtctgccagcagatccacctctactatgacagagtatcccgcctggccgtacggcttgatctggatgtccgcctgacccttggactcgtcccgctcccggctggtaggcagaacatacagggccccgtccacatcctgatacaggggatgggctccgccggaggccagcagcgcatccaccagctcctctgaaaacaggccccgcagataggcccgcaggtctgccagattttccatgcccgggtactccaccggatagtaaagccagccgtctatggtctgcgtcttctctccgcagggcagcgtctccaggctgaaccagccgtacgcctcctccgcccggaaataggccgcctggatctcctcgtccgtcaggggacgggcctgaccctccagcctgacggcggacagaccgccctccgcatccggtgcagaggcctccgcaaaaacggaaggcgcttctcccgccgccccctcgtccgcggcgggcccgccgcacccggccagcgcccacagcgccagtgccagaaacagcacgctccacctcttcatagcttcctctctccttctcccaaacgggccgccggcaccgcagggcccacagccgtaaggctctcctctctggtatcagcgtatcacagttttcagaaaaatgccattcattttttacttttttccgttttttcgacagttttttgaaaaagccgcaaaaatgccgcccggaacattccaggcggcagaggagatcggtctccccggggaactgcatatcgtcagcggagcgaaccacatccgcggaaactgtcaagcgccgggccgaaaaaagaaaaatccacgcctccggcgtggctctccatcggattccgttctcaccgctcgctgtgcttccagccggcgtccgtaaagatcaggtcgtccacatcgtcgagatcccgccaattccaattcatcatactgctccctcctttctctctgaggattacagaattcagtatagcagggtgggcagccgtctgcaagggcaggaatatacagtttacataaaatttttgcaaagtttttgtgcaggattcttctcccagtaggccgaaaccatacggaagccacccgccatttccgtcttctttgtgtatttttccactcgtcatatccatactatttatggtataatagccgcgaagcggctattatactggccgggcatctgctccgcgcctgcggaggcgcctttttgcagcgcccgcgcttcctacattcggatttgctttttccacgtctcggacgtgctgcgttccgcggcggaggaggccgcgttcaccatgcccaagcatcccaagcgccgcacccggcggaacctggccgtgctggccctgtccgccctgtgcctgaccggatttctctactgggacaacaccgctctgcaggtgacccggtttgaccctgtcttttccgatctgcccgccggttttgatggctgccggatcgtggtcctcagcgacctccacggcgcctcgttcggtgcgcacaacgcggacctgctggcggctgtggccgcggagcagccggagtacatcttttttctgggggatctggaggacaagtaccgggggccggcggacggctacccggcggagaccgcccggggactttctgccattgcccccacctactacgtcaccggcaaccacgagtgggccgtgggcggagtgccggcgctgaaggaaatcctcaccgccaacggcgtcacggtgttgtccaaccaattcgtgcccctggagcggaacggggacaccattgtcctggcgggcatcgacgatcccaacggctacgccgaccagaagacgccggaggaactggccgccgaggtctacgccgcctgcggcgaccccttctggatcctgctggcccaccggaacaaccggtttgcgcgccagtacagcctgctgggggcggatctggtgtgctccggccatgcccacggcggcatcgtccgcctgcccgggacggacgggctgttctcccatgacctggacctgtttccctcctataccgccgggctgtatgaagaaaacggctccgtgctgttcgtcacccggggcctggggaattccgggccctccttccgggtgttcaaccgcccggaaatcgctgtgctgacgctgcgccgggcggagggctagtcccggcggcaggcttccgagcgccgcaggcccagggcaaggccctggcaaaagcagaacagcccatagccccggaccgggtcctcccgcagatactccggccactggcccgggtccggagccgggccccaggcgaggaagagttcttccatgatatcaggtatttcctgcatgataaatccccttgcaaaaaatacagttatatgtactatcattagaatggtacatagttatctgtgtgtcaaggaggtattgcatgttttccgagaaaattcgccagctccggaaagatcgccatctgacccaggcagaggtggccaaggaggtcggcctgtcagcccggggctatcaggacctggagctgggcgccaagccccggtatgacgcgctgctgcacatcgcggacttctacggcgtgtccgcagactggctgatgggccgcacggacaaccctgctgtgaatcgctgaaaaaggaactgcgggaggtccaatatgtttgccgataaaattcgagtccttcgtaaagagaaaaagctgacccaggcagaagtcgccaaggaggtcgacctgtcagcccggggctatcaggacctggagctgggtgccaagccccggtatgacgcgctgctccacatcgcggacttctacgatgtgtccgtggactggctgatgggccgcacggacaatccccatgcacaccgatgaaaggatttccaccttatgaccgaattcctcgccggacaatttgatatcgccgtgatcggcgcgggccacgccgggatcgaggcggcgctggccgccgcccggctggggatggaggccatcgtctttaccatcaacctggatgcggtgggcaacatgccctgcaaccccgctatcggcggcaccggcaagggccatctggtccgggagctggacgccctgggtggcgaaatggcgaaggccgccgacgcgtgctgcatccagtaccggctgctgaacaagggaaagggccccgccgtctggtccctccgggcccaggcggaccggcggcgttatcaggagtacatgaagcacaccctggagcagcaggaccatctgacggtccgccagggcgaggtggtggaggtccgcacggagaacggcgcggtttccgccgtggtgctggccaccggggcggtgttctccgtgaaggccgtgatcctggccaccggcacatatctggcgggccgcaccatcgtgggcgagtgcgtggaggaatccggccccgacgggatgcacgccgccggacggctgacggactccctgctgaagctgggcctgcccctgcggcggttcaagaccggcaccccgccccgggtcaacgccaggagcgtggactttgacgagatggagctccagcccggcgatgccttgccggtccccttttcatacggcacccaatccccgccggagaatcgggcggtctgctggctcacctggaccacggaggagacgctccggatcgtccgggagaatctggaccgggcgcccatgtactccggcgtcatcgagggggtgggcccccgctactgcccctcctttgagaccaaggtggtccggttcccggacaagctccgccaccagctgtttgtggagcccatgggcctcaacactgaagaattgtacatccagggcttctcctcctccatgccggaggaggtgcagatccggatgctccgcagcgtgccgggcctgcgccatgccgtgatgacccggcctgcctacgccatcgaatacgactgcatcgaccccctggccctgcgccccactctggagtgcaaggctgtgccgggcctatacggtgccgggcagttcaacggttcttccgggtacgaggaggcggcagtccagggctttgcggccggggtcaacgccgtgcggaagctgcggggcgagtgcgatttcatcctctcccggtcggagagctacatcggcaccctcatcgacgatctcgtcaccaagggcaccaacgagccctaccggatgatgacctcccgcagcgaataccgcctgctcctccggcaggacaacgccgaccagcggctgacccgccgggggtacgacatcggcctggtgccggaggcgcggctgcgggccgtggaggcaaagtacgacgccgtggcccgggagatcgcccggctgacccacaccggcgtctccccctcccccgccctggcctcctttctggcggacaagggcacggcggacgccccggacggctgtcccctggtcgccctgctgcggcggccccagctcacctacgcggacctggcccccttcgacccggaccggccggacctgccggcagacgtggcggagcaggtggagatcagcgtgaagtacgaggggtacatccagcgccagcagaaacaggtggaggacttccaaaaaatggagcggcgccgcctgccgccggatctggactattcctccatccaggggctgcggctggaggcccgtgagaagctgaacgccgtccgcccggcggacctggggcaggcctcccggatctccggcgtcagccctgccgacgtgacggcgctgatgatctatctggagcggtagtgcggcgcctgcccctgctccactcccagggccaggcccagctggaggcctctggcaaaggccgcggtacaccattggagacgcaggcccgccacctggtcgaacaggccgaggcggatgtcctccggcgcggcggccagcacctcctccagcacatggtcctggaagagcggctcctggcacagcgccgcctctgcgtactcgtcgtagagccattcgtaaatttctttcacaagcgccctcctttcacgatattatatatcgtgtttattgtaacacgagatcttgtatcagtcaatagaaagggacccctctatggatgtgattctgcctattttttcccagcgcctgaagcagctgcgcagggaccgcaagatcacgcagaaggcgatggccgagctgcttggaaaaaccgagcgccattatcaggcaatcgaggccggatgcatcaacgtccccgccacacagctgatctttttggccggatattttcaaacaagcgtggactacctgctgggcctctcggaccagcggtgacccgctctcccagaacttagaaaaagcaccatgccccgccgcatggaaggaaaggaagctcccgcccatgattatcgacctgacccacaccatcacgccggagatgcccatgtatcccggctccgccgccccctccatcaagcccaccggctccctgacccgggacgggttccgggagacccagttgaccatcgcctcccacaccggcacccacatggacgccccgtcccacatgcttccccggggctctacgctggaggtgctgcccgcctcccagttctgcggccgggccgtggtgctggacgtatcggacctgccgcccggagcgtcatcaccgccgactacctccgggagcagaacgggaccatccgctcggcggatttcgtgctgttctacaccggctgggagcggaagtggggcaccggcgcctattatgacgacgatttccccgtgccggaccaggaggcggccaaatatctggtttcctgcggcctcaagggcgtggggaccgacgccctcagcgtggacaccctgcgggatcagcagttcctggcccacaaaactctgctggacggcggtctggtgatcctggagagcctgtgcctgaaaaaggtcgtggggcgcaccgacctgatgcttttcgcactgcccctgaaatttgagaacgccgacggcgcgccggtgcgcgccatcgcggaattccgggacttcccggaggaaaaggagatggaggcgctttgagaaagtttctggccatcctggtgtgcaagctgggccgcgccgtgggcaagctggtgggcaagggcagctctatgcccggcaaattcgccctgaagatctgccccgatatcctcgcccgggtccagctgcccagccacatcatcgccgtcaccggctccaacggcaaaacctccaccgtggagatgatcgccgccatcctgcgggccgggggcaaaaccgtggtctacaatgaagagggctccaaccagatcgagggcgtcaccacgctggtgctgacccacgcgtctctcacgggccgggtgcgggcggatgtgctgctgatcgagtccgacgagcggtacgcagcccagagcttccgctacttccaccccacggagttcgtcatcaccaatctctaccgggaccagctgacccggaacggccatccggagtgggtgtatgacgccattctcccggccctccatccggagacggagctgatcctgaacgccgacgatcccctgtccagctgctttgcccggggacgggacagggtgaagtggttcggcctggaccgctgcccctccgacaccgcgtcccccaccggcgtgtaccacgacggggcctgctgtccggtgtgccatgcccccatggaatatgactacgtccactacaaccacatcggcgctttccgctgcacgaaatgcggccatcacaagcccgccacggactacaccgccacggcgctggacctgggccggggcaccctgaccatcgacagctccatcaccatccagctggccttccgcagcatctacaacgtctacaacatcctggcggcctatgccgcctgccgggagtgcggcgtggcggcggacaccgccgccggggtcatcaacaactacatcctgaagaacggacggatgcagaaattcaccctgggggagcaccgggggatgctgctgaccagcaagcatgagaactccatcgcctacgacacgaacctccgctacatccgcgccgcccaggagccctgcaccgtcctggtgatcgtggacgcggtgagccggaagtacttcaccagcgagaccagctggctgtgggacatcgacttcgaccagctgaacgccccccaggtgcagcggatcatcctctccggccggtattgcaacgatctggcggagcggttctccttcacggacattccccgggaaaaggtcacggtccaggcggacatccccgccgcggcggcggagctgaaggcggacggcagtgaaaacgtatacgtggtcacctgcttctcggaccgggacaagattctctcccaggtggtaaaggaggcgtgaggacatggaactgaagatcatccacttttatccggatctcatgagcctttacggcagctatgccaatgtgtccgtcctgcggcggtatctggaggccctgggctgcgccgtcacggtgcaggccgtcatcccgggggagggcgcggacatcaccggcgccgactttctcttcatgggggccggcacggagcgggcccagcggtttgcggcggaggacttcgcccggtacggcgcggcggtgaaggccgcagcggaggacggcaccgccatgctgttcgccggcacagctatggagctcttaggcgcctctgtcaccgacagggacggggacacgtatcccggcatcggtctggcctctttcaccacggtccagggcaagcggcggatcgtaggggatgtgtacggcgttacagccctgtttccggaggccgtggtaggcttcatgaacaagtgcggccaaatccgcggcgtggaggcgccgctgctcaccggtctctctctaggcttcggcaatgaggcggagaagggcccggagggcttccactggaagaacgtgttcgcctctgagctcaccgggccagttctggtaaagaacccccggctgctggaggctgtggcggacgccatctgtacccggcggggcatttccctgccagaggagcggccgtccttcccctatgcagaggcgggctacgccatcacagcagagcagttgaagctgcgggccgaggcccggcagtgattgcagggagaatccgccaggacggccgcctgtgggcggccgtcctgttttttgcagaggcccgccggggccgtgcgcatccaactccagccacagactgacgcagggaagcgcgaccatgggggacattgcccggaaaacggaccggggagcggttgcaagccgctccccggtcttattttattccgtattgcttaaaacctcattgtgcttatccaccacgctgatctccaaatcccggtaatccgcggtgttcggctcctccgtcacccgcagcagccagggggcctcatactccgtatccagcagctgcccattctgtgtcaccacacagtaaggtgtaaaattctctcccaggatgaaccagtcccccgcccgctgctccataccggtgatctcgatgggcaccatgcccatctccatctccgtgggtctgtagcgggcctcgccctcatagcagtatccttttccatagagggcgtcatattgcagcatccgcaggtccgcccggtatgtaggctcctcccggcaggtctgctggaaggcggtcatcagcccggtggtgatgcccaggcggcccagcacagcggcggagagctgataggccgccaggggctcgtcctgctgttccagcccaaagttgtcccagatgatgtactctgtgcggtagaggctgctgctctccatgttctcggcctccagccccagcgccggcaggtggtcgccgtagagcaccagcaccgtccgctcgtcccgggcctccagctcctggatcagatcccccacaaaggcgtccatctcatgaatctggttcacataatactccaaagcccagcggtacgcctcatcggggcacgcttccaccgtgacggccgggtcctccagctccggctccatggggtatttgccgtggccctgcacagagaccgtgaacaccagatccgcctggtcctccgtcacatccagcgcctggaggatctggtccttcagcacgccgtccttagcccagttggtgggcgtcttctccaccgcaggcatatactccagggcggtaaaatcatcaaagcccagattgggatagacctcgttccggctgtaaaaggccgcccggtgattgtggatggcatgggtcgcgtagccgttttccttcaggtcgtaggccacagactccacggtctgatccttcaggcaggtctggaaggggtactccccgggtccgaagaaccggctgctcataccggtaagcacctcgaactctgtattggctgtgcccgcgcccaccaccggcaccgtcagatagccggaggaatacgcttccttcagcgccgtccagttgggcaccggatcctccgacagctccaggccctggatcatggatggatcaatataggactccagctggatgaagatcacattcacatccgtctgcggatcggcggagagcgccgccgtcttctcctccaccgaccggacaatatccgccaccgccttctggctgtaattggccgggcggcggatcccccggttcagccaggtctgcaggaagcagtaggaaaagccgtagtcctcgtaggcaaaggccaggttggcaaactggtctgacaggttgcctgtgaaaaaggccagggcgcatccgccgcccatcagggcgccggagaccgccatcgctccgatgccggtgagaatccgggtccgcagcggacagctgctgcggggccccttccagaacagcagcaccagccctgcggccaccagcaccagcgccgcgatcagcagaatgatgtagccggtggagagatagttggggaccgtgtccagccccgtttcaaacaccgtcagatccgccacggtgaagggcgtcatacggttgaggaggatgaacccgttcacgccgccgcagatcagccacaagaaggacaccaatgcgcaccagaacgcccgccgccgcagaaaaaaggcggggcagagcgtcagcagtacaatcaggaaattcaccagaaatgccagcggttcctccgtcataaagcgccaaaagctggcgggcccatctgtgaagctcttgtgattgaacagctccaccacgacggtgaccgctaaagccagcagcggaagatacaggaacgctctgcgttcctgtcgatgccgttcggcatccgcggccgccggcggcaatgtctgttgcatcggaatgaccttctttcttttcatagattttttattatagcgcctttccctctgcaattccatgaattttttgcgaacttttttctttttcttttctaaaatttcatctgattttgaagaaagtctccctgctccatcgtattggaaactgcggcggaaacctcttgacaggcggccccgtttgtattattgtactatcgtaatagtacattgagaggagcggatttcatttgcagcagcgatccaagttcattcaaagaaccagcgctctggcgctggcggcggtcctggcactcggcatgggtgttcaggcggccggaccgggcgcatccacagtggatgaccggcgggaggacctgaccatattttatgagacgctgaaagacagccatccggatctttttgccaacacgccggaggagaccttcctggcccgcaaagcagagcttacagagcatctggacagcgcaagcgacgtagaatttctcttcggcttgcagagtctggccgcgcttgtgggcgactcccacaccagcgtccaggtggcggacagcgtggtggaccagctgaatgcctatcccatggtgctgtcctggcgggacgggcactggtacctgaccacagttccggctgaggaacaggatctgctgggcgcggaggtcaccgccataggcggccgctctatggcagaggtggtgaagacctttggccgcgtgctcagtgccgacaacccggtgaagctgcggcggcagtaccggcaggtgtgcaatgtggcggattactacgcctatctgggtctggcaaaggcgggtgagcctctggccctcaccctggctgacggcaagaccgtctccatcgctcccatgccctacctctccctgggagaggcggaaattgtccagctaggcgctgaggtgccccagcccgccactgcccgccagaagtgcaattactgcgcacttccgctgagcgggcaggtctactatatccagtacaacgtctgccaggaggacccggcgctgcccatggagggctttgccgcccaggtgcaggcggacctggaggccggaagttacagccgcgttctcgtggacctgcggaacaacggcggcgggtcagacggcgtaatctggcctctgctgtccgtcctgcggcaggagatggatgatgggaccgaggtggtgggactcatcggagaggccaccttctcctctgccatcatcaatgccgtagagctgcaggaaatgggcatcccgctggtgggagagcctgccagcggcagcgtggaccactttggctccgccagtggcttttctctgcccaactccggcatccagattggtgtctcctccaaatacatcgacctgggcaccctgctggacgccgacgccggacggggcgtggagtctctggagccggatatcgccgttccccaaaccatggcggataccctggcgggcagagacaccgctgtggagtggctgctggcccatccggagacgctggaacagcgggaatacccggatgcgccgctcacccgggggcggttcgtggggcagctgtatgctgcggccgggtcccctgccgcagcggcggaggccggtttccaggatctgctgggcatcgagtggttcctgccggcggtgaactgggccgcggagaccggcgtcaccggcggtacggcggagggcgcctttgcggccgcccggcacctcacctggcaggaagccgccgtctttctcgtccgcactgcggaggccctggggctggagccggaggctgtccgcaccgcgcctctgcccgatgcgctggcggagggtgcctgggaccaaaccgctctggaactggcctgggaatggggcctgcttccggaagacgcgggcagcgccgccgaaatcgctcgggtccagggcggggccatggcggatacctttgcggccctgctgtaaccccacgaatcgtctgaccagaaacagcccccggacgctgcggcgtccgggggctgtctcaacctctctgacggcggtgtgccgctgttctctgacgggctgtcttccaggcgcacgtcccggcagagaaaaggaccgcgggataactcccgcggtcctctgatatggtatatgcttactcgctgtacatggccttcagcttcagcaggtgctgatagcgatccatggcagctttctcgttgcgctggaacagctcgccggcgcggtcggggaactcgcgggtcagacggctgtaccgggcctcgttcatcaggaactcctgatagccgccagccggctccttggagtccagcgtgaacttggcaccctcagcggcggggttgaagcggaacaggttccagtagccgcactccacagccttcttcatttccttctggcagttcatcatgccgcccttgatggagtgcatctcgcagggggcgtagccgataatcagggacgggccgggataagcctcggcctcctgaatggccttcagggtctgggcggggttggcacccatggccacctgagccacgtagatatagccgtaactcatggcgatctccgccagggactttttcttgatctccttgccggccgcggcgaactgcgccacctggccgatgttggacgccttggaggcctggccgccggtattggagtacacctcggtatcaaagacgaagacattcacatcgttgccggaggccaggacgtggtccagaccgccgaagccgatgtcgtaggcccagccgtcgccgccgaagatccacatggacttcttggacaggaactccttgtccgccagaatctcagcagccagcttgcaggcgtcacactggcacagcgtctcgccctttgccttcagctcctcgccgaaggcatggatctccgccttgggattggccagcagctcgtccacagtgcagatgctgctctccagggcggcgatgtatgccttggtggcctcgccgttggcggcgctgtcctccatggtgtccagccacttctggccggcctccttcagagcgggcactgcccaatccttggcaatcagctcccgggtcagatccgccagacggctgcgggtggcctgctggcccagatacatgcccaggccgtgctcagcgttatcctcgaacagggagttggcccaagcgggaccatggccttccttgttggtgcagtagggagaggtggcagccggaccgccccagatggaggagcagccggtggcgttggagatgtacatccggtcaccgaacagctgggtaatcaggcgggcatagctggtctcggcgcagccggcgcaggagccggagaactccagcatgggctgacggaactggctgcccttgacggtgttgtcctgcatgtccttcttctcggacacctgggagacgcagtagttgaagacctcctgctgggcggcctcctgctcctggtccaccatggtcagggcgtccaccgggcactggcccacgcacacggcgcagcccatgcagtccagcgggctgatggccatggtgtacttgtacacgcccttgcccttgccggccttcacgtccacgatcttggcggcggcgggggcattcttggcctcctcctccgtcagagcgaagggacggatggtggcgtgggggcagacataggcgcagttgttacactggatgcacttggtggaatcccaagtgggaacggacacggccacgccgcgcttctcataggcggcggcgcccagctcgaactggccgtccacatgcttgacgaaggcggacacgggcaggctgtcgccgtccatgcggcccacggggtccagaatcgtgctgacctgctccaccagagcggcggggccctcgtgcttgacgggctcggcctcgtccacagcgttggcccagtcggcgggcacatcgaacttcttgtaggcggtggcgccggcgtcgatggccttgtggttcatgtccacgatgtcctggcccttcttcaggtaggagtgggtggcggcgtccttcatgtagcccacagcctcgctctcaggcatgaccttagccagagagaagaaggcggactgcaggatggtgttggtgcgcttgcccatgccgatttccttggccaggtcgatggcgttgatggtgtagacctgaatgttgttcttggcgatgtagcgcttggaggcggcatccagatggtggctcagctcctcgtcgctccactggcagttgatcaggaacacaccgccgggcttcacgtcccggacaatggggaagtgcttggtgatgtaggcgggcacgtggcaggccacgaagtcggccttgttgatgtagtaggaagacttgatgggggagtcgccgaagcgcaggtggctgatggtgacgccgccggtcttcttggagtcgtactggaagtacgcctggacatacttgtcggtatggtcgccgatgatcttgatggagttcttgttggcgcccacggtgccgtcgccgcccaggccccagaacttgcactcaatcgtaccggcgggagccacgctgggagcgggcttctcctccaggctcaggtgggtcacatcgtccacgatgccgatggtgaactcgcgcttcatggaatccttcttcagctcgtcatacacggcgaagacggaggcgggcggggtgtccttgctgcccaggccgtaacggccgccgatcacctggatgtcggtccggccggcgttggccagagcagtgaccacgtccatgtacaggggctcgccctgggagccgggctccttggtgcggtccagcacggcgatcttcttgcaggtggcggggatggcggcgagcagcttgtccgcacgccagggccggtacagccggaccttgatgaggcccaccttctcgccgcccgcattcagatagtcgatgacctcctcagccacgtcgcagatggagcccatggcgatgatgacgcggtctgcgtcggcagcgccgtagtagttgaacagctgatagtcggtacccagcttctcgttgatcttgcccatgtacttctccaccacgtcgggcagagcggtgtagtagctgttgcaggcctcacgatgctggaagaagatgtcgccgttctcgtgagagccgcgcatgttgggccgctcgggattcagggcgtgcttgcggaacgccgccacggcgtccatgtcgcacatctccttcaggtcatcgtaatcccacacggcgaccttctggatctcgtgagaggtccggaaaccgtcgaagaagttcacgaagggaacgcggccctcaatggcggccagatgggccacgggcgccaggtccatgacctcctgcacgttgccctcgcacagcatggcgaagccggtctggcggcaggccatgacgtcggagtggtcgccgaaaatgttcagggcgtgggtggacacggtacgggcggacacatggaacacgcagggcagcagctcgccggcgatcttgtacatattggggatcatcagcagcaggccctgggatgcggtgtaggtggtggtcagcgcaccggcggccagggagccgtggaccgtgccggaggcacccgcctcggactgcatctcgacgaccttgacagtggtgccgaaaatgttcttctgaccagcggcggaccactggtcgaccaagtctgccatgggagaggacggggtgatgggatagatccccgccacttcggtaaacgcatagctgacatacgcagctgcgttgttaccgtccatggacttgaactttcttgccataaacttacctcctataaatgtgctgcccacacgacagcattctgaaccaacatgaacacggtcgcattcccccgaatgctcatgcagtgttattatatcacttgaaatttgccgtgtaaataactgccttgttattttttgcgcaaattttctggtttctgcggaaacgtcaagacttcctggaattttcaggccagttttggaatccggggtttcttatttcgtcgttttgtggtaaactgacttccgtgaaaacggcggttttcgacaattcgcaatcggctcttccggcagcgggcggcagcctggagcgggagggcttctggaggtggtcgtttatggtggtgacggtgcgctccctgggactgaacggcattgccgggtatgcggtcagcgcggagtgcttcctctccggcgggctgcccgcctttgacatcgtgggtctgccggacgccgccgtgcgggaggcccgggagcgagtccgggcggcggtgaagaactgcggggccaagttccccgtcagccgaatcacggtgaatctggccccggccgggcagaaaaaggcgggcacagtctacgacctgcccatctttgtggggctgctggccgcaggacgggagctgccgccgccggcccagcaagcggcgtttatcggggagctgtccctcaccggggcgctgcggggcgtcaccggcgtgctgcccatggccctggcagcccgggacgccggtgtgaaggagctgtatgtcccggcggagaacgccgctgaggccacgctggcaggcggcctcaccgtctacggcgtaccggatgtaggggcgctggtgcgccacttgcggggcgaggagcgcctctcccccgcctcggcctgggtgccggaggcagaggaggccgccgggccggatctgcgggatgtgatgggccaggaaaatgccaggcgggccctggagatcgccgcggcaggcggccacaacctgctgctgatcggctcccccggcgcaggcaagtccatgctggccaagcggctgccctccatcctgccggatatgagccgggaggaggcgctggaggtctccggcatctggtccgtggcggggctggcggacccgcagcaccccctgctgacccggcgccccttccgcagtccccaccacaccgcatccgccgccgccctcactggaggcgggccgctgctgcggccgggggagatctccctggcccacaacggcgtgctgtttctggacgagctgccggagttccaccgggacgtgctggaggccatgcgccagcccctggaggacggcacggtgacagtggcccgctccggcgggacgctgcacctgcccgcccggttccagctggtgtgcgccatgaacccctgtcggtgcggctggcgagggcacccctccgggcggtgtacctgctcggaccgggaggtggccaagtatgtggagaagatctccggccccctgctggaccggatcgatctccacgtcagcgttcccgcggtggaatacgcatccatgcggcggaaagagactccggagagctccgccgatgtgaagtgccgggtggacgcggcccgggctgtccagaccgcccgctttgccggcaccggcgtcacctgcaacgcccacatgaccgcccccatgatcgggcagttctgccgcctggaccacgccggcgatgcgctgatgaagtccgccttcgagcggatgggcctcaccgcccggtcccatgatcggattctgcgggtagcccggaccatcgcggacctggacggtgcggcggacatcaggccggagcatctggcagaggccatccagttccggaataccgatattttgaagggataaccgggtccccgccgcagcccagcgcagcggactttacgggggcaaggcggaagccattccgttccggaaccggacattcccaaaggatcagaaaaccaggcggccccggaatggggccgcctggttcactgtggcggaaataacgtggtcagtgccggttccagagaagcagggccgccagcagcggcactcccagaagcaccgctgccaatattatggcgaagatccgggcccttttgcggaacccctccggcgagtaatccatatctccctttttcaggcggtgcagccagaacgtgttcaggccccagatcaccaggccgatcaccggtacgatcacaaaaaccgaaaaccatccgtctccgttggaaccataatacagcgggctcattctccagattcctccttccgccaatcgccgactctcctctttaccggatgaagttcatcatgggacggggcgtgctctccggcacagggaccctgctctccgccagcaccttcaccatccaggccatatcccggcccaggcgggcggccacctccatgccctcctcgtctttcagggcctcgccggggtccgcgccgtgtacggcgccccagtagtcggaggtgacgatgaccatctccatggcatccatggtgcccagcagctgctgatacgtctccatgccgccgctgcggcgcagggtgcacagggcgccccccaccttgtggtggagctgattcaccccgcagcccgccgccagcatcagccggtccagcacgcacttcatattgccggaaataccgccgtgatacaccggagctgccagcaggatgccgtccgcctcgatgcaggcggcgatgatgtcgttgaccatatcgtcggtctggacacaccggaggctgccggtgttcaggcagtggtagcaggccatgcagggatggaccttcgccccgggctggaacacctggaactccaccccggcggcctccacctcccgccggaccacctccagcacctgggcggtgttgccgttctttctgggactgccgttgatggccacgatcttcataaacttcccctccataatttggtttccccctgttgtccctccattatagcagagggctggacggcgggcaagagctccttttcccccataaaaagagacgccctgacgggcgtctctttggggctctggggaagatcaccagcggtcgttgtcgatgtcccggctgaagatggtcccggtgacggcgtcgatctcaaattcgtactcggtccagccgttgcggatctcgacttcatactgcgcccggccgtcatcccagtcaaactggcacttcaccaccgtggagccgctgggcgtctccgccagggcgatctgctgggcccgctctgcggtgatatagtcaccgctggaagagttgctgccgttcccggaggggcggctggtgccgttgttccagatctggaaattctccagctcccgatcggagctgaggatggcgccggtgacggcgtcgatgtcgtagtcatattcggtggtgccgctgtaaaactccacctcatacttcatccggccgtcatcccagtccaggttggcccgcaggaacacggcgttggcctctttgacaccggcgtcattcagggcgatctgcttggcccggtcggcactgatatagttgccggaggcggaagaggcgccctgctggctggcggtccggtccgcggtggtcagctggaccgtgcgggtggccgagttgaaggacacgtccatacccatggcctcgctgatggcccggacggggacataggtggtgccgttgtagaggaacacggggacctgctttccggcggcatcccgcggggtgaatctggcgccgttgagggtgatgccgatgccgtcctccacctggatgctgcgcttggaggtggcggtggccgtgacgcacagtgctgcgatcaggaccgtcaggaccaaaccggagccgaagcccttccagaaaccgttctgcttcattgttcattctccttttcatgttctgcattcggcgggtctctcccgccccttctgcaccattaacggcgccagaagaggttttattgcaccgtgcggaaaatttttttatttttttcgcgccgctggcccttccctacaaaacaggctttctattcccggaaaaatgcgctataataggggccgatattccaaactgttctgatatggaggtccgttatgatgaatgcttcccctgccccgcaggagatctttttgctgaaactgggcgaggtggtcctgaagggacagaatcgccagtcctttgaggacaagctgctggccaacgtccgccgccgggtgaaaaactgcggcagcttccagtgctccctccggcagagcaccatctacgtggagccccagggagaggactgcgatatggaggccgcctgggacgcctgccgccaggtgttcggcattgccgccgtggcccgggccgtgccctgtgaaaagacagtggacgccattgtggaggccgcccggacctatctggcggacgcctttgccgttgcgaagagcttcaaggtggagagcaagcgggcagacaagatgtttcccatgaactccatccagctgagccaagctgtgggcggcgatctggcggagctgttcccccatgtggcggtggatgtccacactcccgatctgacagtatttgtggagatccgggagaagtacgcctatgttcatactccctctgttcccggcgcgggcggcctgcccatcggcatgggcggccgggcggtgagcctgctctccggcggcatcgactccccggtgtcctcctggatgatggcccgccggggcgtggagctggagatggtccactttgtctccccgccctacacctcccagcaggcccaggacaaagtactggagctggcccggctgctgactgcctggaccgggcggctgctggtccacatcgtccccttcacggagatccaggaggagatccggcggaactgcccggaggagtacttcaccctcattatgcgccggttcatgatgcgcatcgccgaggccatcgccaggaaggccaacgccggcgccctggtcaccggcgagtccctgggccaggtggccagccagaccatgctggccctgggggtcaccgaggatgtgacctccctgccggtgctgcggcccctgatcggcatggacaaggtggagatcatccgcatgtcccgggagatcggggtgttcgacacctccatcctcccctatgaggactgctgcacggtgttcacgccccgccaccccgccacccggccccggctggaagatgtgcggcaggcggaggccgccctggacgtggagtccctggtgcagaaggccctggcggacgagacctgggtgcgggtgaagtccacggatccggcccggatctgatccaatctgttcccggccccgccgcctgtcgccggcggggccgctgtttcaaaaaggaggtctttccatgtcacacaccgcggagatcatcgccgtcggcacagagatcctgctgggtaacatcgccaacaccgacgcccagatgctctctcagagcctgtccaccctgggcgtcaacgtcttctggcacacggtagtgggggacaaccctcagcgcctgcgggaggctctggacattgcccggcaccgggccgacatcattctcaccacaggcggcctgggtcctacctacgacgatctgaccaagcagaccatctgtgcggccttcggccagaagctggtgctgcacgaagatattctggaggacatccgggccttttatcagtccgccctccatgtgcccatgccggaaaacaacacccagcaggcggagctgccggagggctgcaccgtgttcgacaatccggtgggcaccgcccccggctgcgcctttgaagcggacggcgtccatgtgctgatgctgccggggccgccccacgagtgcgagactatgctccgccggtgcgtggagccgtacctccgcgccctctccaaagaggtcatcgtctcccacgatatcatgaccttcggcatgggcgagagctctgtggaccagctgctccatgaccggatggtccgcatggtgaaccccaccctagccacttatgccaagccctgcgaggtgcggctgcgggccaccgccaaggccgccggcgcagaggaggcggaggccatgctcgccccggtggtggcagaggtccgcgcggctttgggagactatgtgtacggcgtggatgtgaagggcctggaagcggtgtgcttccagctgctgaaggagcggaatctcaccctgtccactgcggagagctgcaccggcggccgggtggcggagcggatcactgccctgcccggcgtctccagcgtgtaccggggcggcgtggtcagctactggacctctgtcaaggcggcggtgctgggcgtgccccaggaaacgctggaccagtacggcgccgtgtcggaggagacagcccgggccatggcggagggcgcccggcagatcaccggggcagacatcgccgtgtccgtcaccggcgtggcgggcccggaccgggatgagcgggacaacccggtggggctggtgtacattggcctggccacgccggagggcaccttctgccgccggacggactccggccgccgccggcgggaccgcatccaggagctggccgccaaccacgctctggacgtggtccggcggtatctcaccggcctgcccatcggataagcgcgcacccaagggggcctgtggggcatatactggcctagcccttcagagaggaggcttctgtatatgcactattctcagggggatttctgttatcccccgtgttgtatcattcccactgttacggtgggcagcactgtcacgacaccccccggcacccgggcccgggtaaccgcctcgcccacgccctgcggtgtggagctggactttgccattccaaggggtaatccgggcccggctggaccccgggggccaatcggctgccagggaccggaagggcctcaggggccggaaggaccccagggaccggaaggacctcaggggccggaaggacctcaggggccggaaggaccccaggggccggaaggaccccaggggccggaaggacctcaggggccggaaggaccccagggaccggaaggacctcaggggccggaaggaccccaggggccggagggacctcaggggccgcaagggcctcagggaccggaagggcctcaggggccggaaggaccccaggggccgcaagggcctcaggggccggaaggacctcagggcccacaaggattccagggcccacaaggactccagggtccccaaggacctcagggtccgtcgggtattccggcctatgcgtcttttgtcacctaccagcaggagtttttcaacggcagctcaatctctttgagtgcggcagcaacggatgtgaccggccacattgtgcaggaatctaccactcagctcctcctgcaaccgggagtatatctcatcgcctaccactttgccgccaaccttctgaccgccggatatcttcaaatcacaccgggctacggaggacgcggtcatctggagtacggcgtctacaatcggaccggtatcgacaataccagtgtatccggctctgcctctttcatcatctccgtggaggaggctacccgtttttccctgaacagcaacagcagcgttaccgttcgggacggcgaagccactctggtgattctggctctgcagcccagcagagaggcctgagctgcgcaagaccgggagaccgcctgcaggcggcctcccggcccttttctgccggagtccagagggcggtctcagccgcccagtgccacgtccagcaccatcatcaccaggaaccccatcacaaaaccgcaggtccccgcccggctgtgggcctggggaatcaactcctccaccaccacgtacagcatcgctccggcagcaaaactcagcaaccagggcatcagcgggtccacgccggccgcggccagtgccgccagcacgccgaacaccggctccacggcgccggagagcattcccccacaaaggccctgggacgggaccagccgccctgccgcaggggcagagccacggcggctccctccggaaaattctggatgccgatgcccatggccagggccgccgccccggcaaagccctcccctccggacaccagggcaaaggccagccccaccgccatcccctccgggacgttatgtagggtgatggctgtcatcagcagagtggtctgccgccaagaggcatcctgccaggtccggtcccgccgcagatggggcagcaaggcatccagagcggacaggaagaccacgcccaacagcattccgcccgcggcgggcagccagtccggcagcgccccctctgcggcccggtcgatggccggcagcagcaggctccacacggaggccgccgtcatgactccagcagcaaagcccagcagggtcttttgaaagtggggccggggttccccggcgaaaaaaaacaccatggccgcgcccagagcggtcatcaaaaatgtgaagcccgtacccagggccgcccagccaagagactgcagcatagcaccaacgccttttctctgattcaggcggaacaccgcccgtatgccagtataagcggcaggacttcccggcgtgacagggcttgcatccggggacgatgtgtgatatggtataggcagcaggaaaagctcatataagttcgctgtcatggcgcgaacgtctctacggagccgccgaaggctcttctatgagtgtctgttggaaggggccatcccctgccggcaggcgcttcttttctgtctgaaaaatccggaacggaaacaaaaggagatttgccatgtcactgacgatcatcaagggaactattctgtccgctcccaccctgggacagctggatgccctgccgggcggatatctggtggccgaggacggcctcatccggggtgtgtacgggtctttgcccgagcagtacgccggtgccccggtggaggactggggagacgcgctgatcctccagtcctttgcggatctgcacctccatgcgccccagtaccccatgctggggatgggcatggacctgcccctgctggactggctgaacgcatacgcctttcccacagaggcccggttcgcggacacaggctacgcccgggagatttacagccgcctggcccgggagcttattgcaaacggcaccacgcgggtgtgcatgttctcctctctccacacggacgccacgctgatcctgatggaggaactggagaaggccggcgtcaccggctacgtgggcaaggtgaacatggaccggaacgctgcccccggcctgttggaggagaccacagaggagtccaggcgtgagacgctccgctggctggatgcctgtcaggacttccgcctggtgaagcccatgctgacgccccggttcaccccctcctgtactaatgagctgatggcgtttctgggcaaactggcggcggagcgggatctccccgtccagtcccacctgtcggagaaccaggcagagatggcctgggtgcgccagctccacccgggctgccagcagtactgggagacctatgccaaatacggcctgtggaccagccgcgccgtcatggcccactgcgtctggtccgatgcgcgggagcggcaggccatgcgggacgccggcgtgacagcggtccattgcgccgactccaaccagaacatctgctccggcgtggcgccggtgcgggccatgctgaatgagggcgtgaaggtggccctgggcagcgacattgccggtggggaccacctgcacatgttcgatgtggtggccgcctccatccgggcctccaaggcccggcgggtgctggacaactgggagacggatttcctcacggtgccggagggctggtacctggccacctccgccggtgcggcatacttcgccgagcagccgggctttgccccaggcaatcatctccacgccctggtcctggcggacgatgatcttccccagccccatcccatgacgccccaggagcggctggagcgggcggtgtatctgcgtcagggcggcgccatccgggcggtctggagcgagggacggaaggtattctccgcagagggttgatcaaagagcgggatgctgtgtgtcccgctcttttttgttcccgtcagggaggcctccctggggagtggtatgggccggcacacccctaaaagcaaacgtgcggcgcaccctgaaacggatgcgccgcatctattttgtattgctcacgccccggcaaactgcgccgggtcccgcagggcgtccgccgtttcccggggcacttcagcggtaaacgtcagcagaccgcccagtccttccacgcctacaaagctcccaacgccctccagggtatcggacaggacctccgtggtgacggcgttgctgccctgccgcacctgggtccggaagacctccaggtattcccgctccgcatccgggtcctccccagcgtggagggtagtctcctgccagtagacataagtgtagagagggtctccctccgcattcccgtggtcggcgttctcgccgccggccttgttgatgagggcgtcgatctctgccacggccccgctgtctgtgacggtgtacagctctttaccggcggcgtccagaatctggtagtagtggtccttcactgcctcctcagcggtgtcggccgcagcttgttccccgccgcaggcggtcagcagcagagtcagggaaaggatacaggggattatatgtcttttcatggctgcctcctgtgtttttcagtgggtggggttcgttgagggctctccccgctgccgttcccccggcggtcacggggcatctgggctgcgggtcgatgagggtatcggcccctgcggatgggttggatctccttctgccctcgttcgcccaccgggatgtcagtcaggtatccatttcgcagaaatacagcgtgtcgctgtccgcgtcatacacggccaaggtgacattcagcgaagcccgctccagaaggttttgtccatccccggcgtcactgtggcggtcaatcaggcggtagaagccattggcgatccccggcagcaggggatctccgctgtcatcggtgagataagggcccgcgctgaaaacttcgccgccgtcctctcgggtgacgccataggccagtgcctgggccgtctcgtccaggggaagcggtgtccaggcggcgttcgccgcaatggcgtcggctacctggctgtcaggaaactgcagggcaacgcaggaaatgccgtcgccgtggaagccgccgtgggtgtcagaagaggagatctcctctccggcggacacatcgatgtgcagcgctcgggagatctcctctgccgggtcctcactgccgcaggcggtcagggtaaacagcatcaaggaaatcatgccacatgcaaaaaggaatttcctcatagataacgaaccccttataagattcaaaacagctgcaccacgccgtaggtcagcgtggtgacgatggccccggcaatcaccacgcccaggaagatggcgggcagcgcgtggcgcatccggatgtccagcagggccgccaccagagcccccgtccaggccccagtccccggcagggggatggctaccagaatgatgagtcccggcaggcggtacttccgcaccatccggcccttcaggtgagcccggcgctccagccagtcgatcctggggccgaaaaggcgggtgccccggagccagtcgaagatccggcggatcagcagcaggataaaaggcaccggcaccatattgcccaggatggacaccaggcaggccgcggccggggagagtcccgccgccactcccacaggaatggcgccccggagctccagcaccggcaccatagcggtgccgaaggtcagcaggatcgcttgcatcaggttttcctctacgggcatggcggcctcccttaagatttccggggccgtgggatcactcccacggcccgccggaagcgtatggtccagtttactccagattcaagcgctttttcaaggtaattgtggttacaatatagaaaatcgcaccgtagagcactgtcagcaggagcaaagccaccatcgtgaagtggaccgccgccacgccggtgagctggaaatccagcgtcagcaggaactggtgcaacggcccctcgtccagcaggaccagaacgatggcccccgccatctgcaccacaaactggaacacaaagaagaacgccacggacagggccatcttatggttggcaaagctgtggcccgccgccagagcggcatagaactgcagggagaaactcatgcaggctgccagcatcagcgccagaagctccagcgcgaaaacggtgccgttgacggcgtagtaggcggtcatctgctggaacagcttggggaaaacactcgccaaatccgtcaagaagctcacgttgaaggccgccacaaaaacagacaggaacaccaccacgccggtggcgatgaaccacacggcggagacgatcagcttgctccacacatgctggtgaaccgaggcgggcagagtgaacatgatgtagccctcgtccccagcagatttttgtagaaccgctggagcatcagaatgaacgccacaatgaacacggcggtaatggccaccacataggccatgaccaccaaagcggccagcatattcagcacaaagttgcctgagtccatcagcctggcggagaaattgaagcccagggccaccgccagcagaaccaggtacaaaggccccatgatgcgggccgtggcacggaattcgtgcttcaagagtttcgtcagcatttgaacacctcccggaacagggcgtccacgctcatgcccttctcctcccggatctcatccacagaggactggagcaccacctggccctgattgatgaaaatgacctcgtccagaaccttttccacatcggcgatcaggtgggtggagataatcactgccgcctcgggattgtaattgccgatgatggtggagaggatgtagtcccgggtggcggggtccacgccgccgatgggctcatccagcagatacagctttgccgcccggctcatcaccatgatgagctgcaccttctcccgggttcccttagacatctgcttgatccgctgggtcaggcggatgttcagatgggtgagcatctcctccgccgccttccgattgaagtcccggtagaagtcgccatagaaatccagcagctgcttcacggacatccaagtggggatgcaggtccgctccggcaggtagctgacgctggcgtggctctcctttccaggggccatatcgcataccagcacctctccctcgctgggggtcagcaggccgttggccagcttgatgagggtggtcttgccgctgccgttggggcccagcaatcccacgatccggcccggttccaccgccaggctcacatggttcagcgccggcgcgttgccgtagtgcttgctcagatctttacattccagaactgccattgtcttctcctcccttggtctcctcctgccgcagcagcgtcaggatctcctcccggccatagcccaggtgggtcatggcctccaggaacgcctgaatgtggcgctccgccaaacttctctttgcagatgcaatcatggcctgatcctccgtcacaaatctacccgtggttcgctggctgtataccagtccgtcccgctccagctccgtcagggcccgctgcatggtgttgggattcaccccggcctccgtagccaggtcccgcacggaaggcagccgctcccccggcgggaacgcgccggagacaatgcccaccttgatctgcgcgatcagctgggaatagatcggcgcgtcattggaaaactgccacttcacagaagcacctcccatttgtgttgttgtactaagcaagtaatacaatagcacattctccagatttgtcaagtggattcgaaaaaaattttggagaggcaaaagcgccgcagcggcttatcgctgcggcgcaagggattcatcggttattcgattttgcggagggaggttctctgatcataccggcagcccaggatgaggatggcgaagcccaaaatggtcaccagaagacagggcaggtcgtcccaaaaagtcacctccacaaattcccacatattctccggcccatactccgccagatacaccagcaacgcagtggaaatactccagaccggccccgtctgcaaaaaccgcagaggcgcgggaagggggagccgcatgttcagcagacccatcagcaccaggagccagcccagatgataccaacgaagccgccctgccaattggcggccccggaataccagaatcacagacacgagaatcagcagcacatggggaatcattgtgggaatatacaccatctgcacgtatttcacccaggcaaaattctcgaggtcctgcgcctgctggtatgtattggccgcaagaacagccaggtcaaccaggttccagacaccccaggccgccagaacccaggccagcagatagcccctgttccggtaccattgcttgacccggacccacaggcccgccgcaggagccgtggtattggccgtctccggctcctctagttcttccagcaataagtaatccgtggacacgccgaactggcggctgatgcggacgagcttctccacctccggcatagcctcgttccgctcccacttgctcaccgcctggcggctcacatccagcagcttggcaagctggtcctggctcaatcccgcccgggtccggagcttttgcagcttctctccaaaggtcatggcgcttccctcccctgccgttttcacacgttcaggataccagacgataccgggacatgccagcaaccaaacctggaatttccgctaccacaggtagcggagcggtgtttccggcgctcaggcgtacattttgtccaggcgggacacgatgtccgccagagtgtcgtggtccgcatctgccacgatggtggccccgcaggcccggacagcgggtacgcagttggcgggggcaaatccctccgccgcccaggtcagcatggacaggtcgttggcctcgtccccggcgcagtagacgtgctggcgggagatgcccagccgctccgccagccgggccaccatgccacccttggtggcgcctctggcggtgacctccagcagtgtccggtcagagaagaagatctcatactcccccgcccagggctgggactgcagaaacgccttgacctcctccaaaacggcgtggtcctcctcaaacatgatctttcccagcggcaggggcacatccagcagggagggcttttccaccacgctcacatgagtgacgtgctcatgctggcgggtatagagattgggccggacggcgtggatcacgttgtcgatgtggtatgcctccaccgccagcgtggggaatcggtccagagtctcctgtccccgccggcgggtgctctcgtccagcagaatggtctccagatactcccccttctgaaaatcatacagggccgcgccgttgcacacaatgcccggcgcgttcatgggcacctgatccgcgaatttgatgaaggccgccagcgcccggccggtggcgatggcaaatctcccgccgccggccatgaaatactccagcgcctcccagttccggcgggacacctccggcacctcggcgcccgtgcgccgggccgtctccgtattcagcagggtattgtcaaaatcgctggccagcagtacaccgtcaaattttcccataaaaactcctccatcctatctctctgaaaaggcagatccgctccatctgcctgctctcccggcatttcaaaagaccgccgcccgaaaaaggggcggcggtccagccggattcactcactcttgggggcggaaccgccgccctcgccgccgtttttgttccggcggcgcccccccggtggtggggcctgcggcggcgcttggcctcgccttcaccgtccggggccgccgccctgttctccccaggtctggcttctgtcggcttgggctgcgcaggcctgctctcctgtttgggggacggggccgcccttccttcttctccggccccctggcctcggccttgggctgctcgaccccctctccgcttttggctccccctctccggcggccgccccgatgccggcggcgtggcttgccgtcgccgctgccgggtgcgccgatcttctcccgcatgggcgcctcttccagctgcgtgtccatatagaagggcggcatcagggccggggcctcctcccggaactcctccgcctccttcggctccacatagcgggcggggcgctccggaatggcgatgccctcccggctgcccttgccgttgcgcagaacgcacacctcacagttgtgatagcacttcaaaggctccggcgcactgtccaggctgaccttcacggtctcccgcagcaggtccacgctcttcacattgccggggccgtccggcgtctgaacaaaggattctgccttgggcatccgcttggctgcgtcctcatagacgttctgctcgtatttcaggcagcacatcagccgcccgcaggtgccggagattttggtgggattcaggctaagattctgggtcttggccattttgatggacacgggcaggaacccgtccagaaactgggagcagcagaagggtctgccgcagatccccagaccgccgatcatcttggcctcgtcccggacgccgatctgccgcagctcgatccgggcccggaacaccccggccagatcccgcaccaactcccggaagtccacccggccgtcggcggtaaagtagaagacgatcttgttgccgtcaaagctggcggacacgttcaccagcttcatctccagcccgtgggcggcgatcttcttctcacagatgtcaaaggcctcgctctcccgcttcttgttctgctccacggtgcggcggtcgctgtccgtggccatccgcagcatagggctcaggggcttgacaatggcggagtcctccacctcgtggttcccctccgtgcaggtggcgaattccgggccctgggcggtctccacgatcacctggtctcccatcttcacctggttgccgtttggattgaaatagtaatttttacagccgcctcgaaagcggacgctgataacttctgtcaaaggatgccctccaattccaccgcgatggcgcccagcacatggccggttcccacgttgtacgtgcactccccgcgatacttctgtaacagctctattgtgcgcatgatttgggattttgtcaagtttttcgcgagaattggggcgatttcccggcagctttcctccggttcctgtccatattgcagcagcagcgccgccgcgcacagggcccggctccgctccagcagggcggacaggtcctcccgggtgatgcgctttttctccagccgcaccgccagctccgtcacctttccccgcttccgggcggccaggcagcggcacagggcctctgccgcctggacctcttcaccgccgccttccgcagccgggtgcagcttcagctccacgcaccgggagcgcagggtctggagcaccacagcggcattttccgcacagaagagaaaggccgcatagggcggcccctcctccaccaccttcagcaacacgttctggtcctgttccgtcagcagggcgcagtccggaaacacatagaccttccgccgcccctcgttggggcggatgtaggcgtctgcccggatggcgcgcaccacgtccacggcgatgttcttatggtctgggtcccggacggtgatcacgtccggatggatgcccgccagcaccttccggcaggcggggcagacgccgcaggggcggctctcctcccccgtgcactccagggcggcggcggcaaagcaggcggcggacatccggtcgccgctgccggtgagcagcagggcgtgggacagggtgccgcgagtggcggcctcccggatgcggatggcggctggctcctccggccgcaggccgaacagggacatggcgtactctccttttcccgctgtgagcacgggctgatctgcagattttccggcggcgccgggtgtttggggcgcccggcggccttccggcgggcacactggagccattgtaccacatggccccgaaaaaggaaagaacgtaaatattttctttgttgcgcaactgttaattgtgtggattgcacaaacatttgtgaaaatactccagctatccccaaatttcttagcatttttatgtattgttttccgaaaaaattcccaatataatgttatcgttatcaaaatgggctaatcgtttaaccgcagattggagtccacccgactttcgactgcggcaggaaagagaggtttggactacatgagcaaaaaatatgtctatttgttcagcgagggcaacgccaacatgcgggagctgcttggcggcaagggtgccaatctggccgaaatgaccaacattggcctgccggtgccccagggcttcaccatcaccaccgaggcctgcacccagtactatgaggacggccagaagatcaacgacgggatccaggcggagatcatggagtatatcaccaagctggagggcatcaccggcaagaagttcggcgatctggagaaccccctgctggtctccgtgcgttccggcgcccgggcctccatgcccggcatgatggacaccatcctgaatctgggtctgaacgaggacgtggtggacgtgctggccaagaagtccggcaacccccgctgggcctgggactgctaccgccgcttcatccagatgtactccgacgtggtgatggaagtgggcaagaagtactttgagcagctcatcgaccagatgaaggaggcccgcggcgtcacccaggacgtggagctgactgccgacgacctgaaggagctggccggccagttcaaggccgagtacaagtccaagatcggcgcagacttccccaccgaccccaaggagcagctgatgggcgccatcaaggccgtgttccgctcctgggacaacccccgcgccaacgtgtaccgccgggacaacgacatcccctactcctggggcaccgccgtcaacgtccagtccatggccttcggcaacatgggcgacgactgcggcaccggcgtggccttcacccgcaaccccgccaccggcgagaagaagctgttcggtgagttcctgaccaatgcccagggcgaggacgtggtggccggcatccggactcccatgcccatcagcgaaatgagcgaaaagttccccgaggccttcgcccagtttgagaaggtctgcaagattctagaggatcactatcacgatatgcaggatatggagttcaccgtggagaacggcaagctctacatgctgcagacccgcaacggcaagcgcacccctgccgctgcgctcaagatcgcctgcgacctggtggacgaggggatgatcgacgaaaagcaggccgtggccatgatcgatccccgcaccctggacaccctgctgcatccccagtttgacggcgaggtgctgaagaagacccccgtgatcggcagcgccctggccgcctctcccggcgccgcctgcggcaaggtcgtcttctccgctgaggacgccaaggcctgggccgagcgcggcgagaaggtggtcctggtccggctggagacctctcctgaggatatcgagggcatgaaagctgctcagggcatcctgactgtgcggggcggcatgacctcccacgcggccgtggtggcccgcggcatgggcaagtgctgcgtctccggctgcggcgccatcaagatggacgaggagaataagcagtttgagctctccggcaagaccttccacgaaggcgactggctgtccatcgacggttccaccggcaagatctacgacggcgccatccccacggtggacgcctctatcggcggcgagttcggccgggtcatgggctgggccgaccagtaccgccgcctgaaggtccgcaccaatgcggacaccccccacgacgccgcccaggcccggaagttcggcgctgagggcatcggcctgtgccggaccgagcacatgttctttgacgcagaccgcattcccgccatccgccgaatgatctgctccgacaccgtggagcagcgtgaggccgctctggctgttctggagcctatgcagcagtccgacttcgagggcatctatgaggctatggagggcctgcctgtcaccatccgtttcctggatcccccgctgcacgagttcgtgcccactgaggaggccgacatcgagctgctggccaaggacatgggcaagagcgttgcggagatcaaggccatcatcgccggcctgcacgagttcaaccccatgatgggtcaccggggctgccgtctggcggtcacctatccggagatcgccgccatgcagacccgcgccgtcatcaaggctgcgctgaacgtccaggccaagcatcccgagtggaccatggtgcctgagatcatgatccccctggtgggcgaggtcaaggagctggcatacgtgaagaaggtcgtggtggagaccgccgatgccatcatcaaggaggccggctccaacatgaagtacctggtgggcaccatgatcgagatcccccgggccgcgctgaccgccgatgagatcgccaagcaggcggacttcttctccttcggcaccaacgacctgactcagatgaccttcggcttcagccgtgatgacgcgggcaagttcctggacgcctattacgacaagaagatctacgagaacgatcccttcgccaagctggaccagaccggcgtgggcaagctggtggatatggcctgcaagatgggccgcgccaccaaccccgagctgcatctgggcgtgtgcggcgagcacggcggcgacccctccagtgtggagttcttccaccggacgggcctggattatgtgtcctgctctcccttccgggtgcccatcgcccggctggctgcggcacaggctgccatcaaggacgagaagtaatcttctctctcataaaaaaccggaccgcccaaagagggcggtccggtttctttgtatcgatgcataagtcacttcgctgtgggcatgaagggccgcagaacccctgccacctgagagatcggcatggtctggagatagacatggcccggtccggtgataatggtgttgaagatcccctcaccgccgaacaccatgttcttgagccccgggaccgcctggatatccatggagcaggtggcatccatggccgccagatatccggtatccaccaccagggactcaccgggatccaggtcgtattccacgatatgcccgtcgaactcggtgaaggcaatcccccggccggagagcttctgcatgatgaagccctcgccgccgaagaagccggagcccagcttcttctggaaaaagacggacagctggacgcccgcctcgctggccaggaagccgctcttctgcaccaccagctcccggcccggaccgatgtcaaaggcccggatgctgcccgggaaactggaggcaaaggcgatcagtccttggccgccctgggcggtgtagcggttctggaaaatggagtcgccggagagcatccgcccaaacgccttccccagaccgccgttggtgctggtctccatcttcatgttgggggtcatccagctcatgctcccccgctcggtgagcatggtctcgccggcctccagctggcagatcaccaccggcagcggtgctccctcgatctgatattccatggtgtgctcctttctcttctcggcccggggccggttttctccattctaccggggccgctgcatcgtgtcaatccaaaccgggcggctttcctggtccctacagaaattttacagccccggcatctaaacggatgccggggctgtgctgcgctcagtactccactacgccggtgtagaccagcttggcatcgccggtgagggtgacggcttcgtcggtgtaatgcaccaccaggtcgccgccctggacccggaccgtgatgtcccgtcccttttcacagaggccgttggccaccgccgccaccaccgcggcacaggcgccggtgccgcaggccagcgtctcaccgctgccccgctcccagacccgcatcttgatggtgctgggatttaccacccggataaactccgtgttgatccggtccggaaaataaggcgcatgttcaaactgcggcccgatccgggccacatccacgccgtccacccgggaacagaacaccacgcagtggggattgcccatgtccacgcaggtgatctcccagggctgcccggcaatctccaccggatagttcaccacctgccgcttcgggatattcagccggagggccgtggtgtccagggtcgcgtagcccatgtccacgcaggcagaggtcaccctgccgtcggtggtgtagacccggacggtcttggtgcccttgtccgtctccagggtcatttcctccttgcggacgataccgttgtcatagaggtacttcgccatacaccgcagggcgttgccggccatggagccctcagacccgtcggcgttgaacatccgcatcttggcatccgccttccgggatccctccatgaggatgatgccgtcggcgccgatgccgtagtgccggtcgcagagggtgacgcacagggactccgggcaggtgatctccccgctgaaattctccaggaagatgtagtcgttgccgcaggtctgcattttggcgaagggcagcttctgccgctccgtccgcagatggcagatatcgacgagctccgtgttctcctggttgtagcggctggccaggatgtccgtcagggcaccggccgtatccagcgaggtcaggcagggaatgcccagctggacgcaccggtggttcaggtggatgaagtcccggatatactccggctccgtagagccggtgaggatcacgtagtcgatcctgccggactccagcagctggaagacccggttgtcccggcccagcttgcccaccacctccacgtccgtgcccaggcgggagatctcccgtgcggtgccgtcggtggcgtagaggcggaagcccatttcatccagcttccgggcgatgttgacaatctccggctgatcccggcggttcacggagatcaatacccccgcgtgtccgctcttctccaccttgtacccggcggagaccaggcccttgaacagcgcctcctgcatattggcgcccaggcccagcacctcgccggtagatttcatctccggggacagggcggcgttggcgtcggtaatcttctcgaaggagaacaccggcaccttcaccgccacgtagggcggacgtttgtacaggcctgtgccatagcccagggccttcaggggctggcccaccatgacccgggtggccaggtccaccatgggtacgccggtgaccttggagatatagggcaccgtccggctggcccgggggttcacctcaatgacgtacagctctccctgatagatcaggtactggatgttgataagcccccgggtcttgagggacagggccagcttttcggagcagtccacgatggtctggagcatcttgtccccgatggaaaagggcgggtacacggcgatggagtcgccggagtggacgccggtacgttcgatgtgctgcatgacgccggggatcagtacatcggtgccgtcagagatgacgtccacctccagctccttgcccatcaggtactggtccaccagcaccgggttctcaatcttgccggagaggatgatctccatgtagcggcggacttcctcatcgttgtgggcgatgaccatgttttggccgccgatgacgtagctgggccgcagcagaacaggataccccaattcattcgctgcctccagcgcctcattcatacccagcacgccccggccggcggcccgcttgatggaaaaccgctccagcagcgcgtcgaaccgctcccgatcctccgccatgtcgatggactcggcgctggtgcccagaatggggatgccgcggctgtccaggaatttcgtcagcttgatggccgtctggccgccgaaggccaccaccacgcccaccggcttctccacggcgatgatgtgcatgacgtcctccgggtacagcggctcaaaatacaggcggtcggcagtgtcgtagtccgtggagacagtctccgggttgttattgacaatcaccacgtcgtagcccagctccttcagcgtccagacacagtggacagaggagtaatcaaactcgatgccctggccgatgcggatggggccggagcccagcaccatgatgaccggcttgccgctgcgggggaaggcccgggactcgcagaaccggtcataggtggagtagaaatagggcgtctccgcgtcaaactccgcgccgcaggtgtccaccatcttgtacaccgcatcccggtgctccggcagttctccgccgccggaaagcctgcggagagcctcatcgggatagcccagccgcttgccctcccggtactgcgcctccgacaggccgtctgcaatggaagcctcgaacgccgccagcttccgcagcttgcagaggaaccaggggtcgattctggtgatgtcgtggatctcctctacggtgacgccggatttcagcgcctcgaacaccgtgaagagcctgtgatcgtccactcggcggagccgctcccggatgggggcgtcgtccccgtggtccggtttccggttcagggtgtccatgccgatctccgcgccccggacagccttgagcaaggccatctcgaagctgggggcgatggccatcacctcgcctgtggccttcatctgcgtgcccagggcccggctggcatcggcgaacttgtcgaagggccacttgggcatcttcaccacgatatagtccagggtgggctcgaagcaggcacaggtcttgcccgtgatgtcgtttttaatctcgtccagggtgtagcccagagcgatcttggtggtgatcttggcgatggggtagccggtggccttggaggccagggccgaggaccggctgacccggggattcacttcgatgaccgcgtactcaaagctctccgggttcaatgccagctgcacgttgcagccacccacgatccccaggtgggtgatgatgtccagagacgccttgcggagcatctggaactccttgtccgccagggtctgggtgggggccaccacgatggagtcgccggtatggacacccaccgggtccaggttctccatggagcagacggcgatcacgttgcccacgctgtcccgcatggtctcgaactcgatctccttccagccgaagatggccttctccaccaaaatctgcgtgatgggcgaggcgtccaggccggtgcccgcgatgatcttcagctcgtcgggatccttggccgcgccgccgcccgcgccgcccagggtaaaggcgggccgcacgatgacggggtagccgatcttctccgccaccgccagggcctggtccacggtctccgcgatgtcggaggcaatcaccggctggccgatctccgccatggcctccttgaagagctcccggtcctccgcccgggagatggccgctgcgtcggtccccagaaggcggacgccctgggcctggagaaagccctccttgtccagctgcatggccagggtcaggccggtctggccgcccaggcccgccaggatggaatcggggcgttccttcttgatgatgcgcttgacggtctccacggtcaggggctccaggtagatctcatccgccatggcctgatccgtcataatggtggcggggttggagttgcagaggaccacgttgatgccggcatccttcagcacccggcaggcctgggcgccggcgtagtcgaactccgccgcctggccgatgacgatggggccggagccgatgaccagcactttctgaatgctcttatccagcggcattaccggtcaccccctttcatcagagctacaaattggtcgaacaggaacgatgtgtccttgggcccggtgcaggcctctggatggaactggaccgtgaatgcccgcaggtccggatagtcgatgccctcgcaggtgccgtcgttggcgttgatgaagcggaccttccccaccggcaggctggtaccgtccacggcgtagccatgattctggctggtgatgtaggtgcggacgccgtccaggtcccggacgggctgattgaccccccggtggccgtatttcagcttgtaggtgccgccccccaccgccagggccgtcagctggtggcccaggcagataccgaacaggggcaccttgcccaggagctttttgatctgctcaatctgatagacgttctctgccggatccccggggccgttggagagcatgacgccgtcaggcttggccgccagcacctcctctgcactggtctgcgcaggcaggacagtgacggtgcagccgcgcttttgcagctcccggacgatgttgcgcttggcgccgtagtccagcaggctgacccggaaccgctcctctccctccgccgggtgggcggatgctgctctacaggtcaccgcctccaccacgccggtgacggcataggtcttcaccgccgtcagatccgccggaacctcatcacagatcgcggcgttcatgacgccgtgctcccggatgatccgggtcagctcccgggtgtccacaccccagagccccggcacgccccggtcccgcaaaaaagcgtccaggtctccctggcagcggaaattggacggctcctcgcaccactcccgcaccacgtagccccggacgcaacacgcgccttcaaaatcctccggaatgatcccataattgccgatcagaggataggtctgcatcacgatctgtccagcatagctgggatccgtcagtgtctccagatagccgcacatgccggtggtgaacaccagctcgcccacggcgtccgccggccccccgaaccggaagccctcaaacacctggccatcctgtaataccagatatcccttcttcatgtcgtcctccctctccggcgcatcgaccggaaaatccctattagatgttattatgcgttttttttctgaagcagtcaatccccccgtgcagtgcggcacggtagacttttccagggatgaaggtattactttttgtgcattttcgcaaaggtcgatctatttcccgccgcactgcctctcttgcaaagcagtaaccaatgggctatgatgcaggaaaagcggctcatctgcacaggcggaagaactgctccggcaaaggagtgcgcctatgatctgtttgcatgcattccggatgcccgcccgggaggacgaagaggcattcttctccgatccccggaaccagcggatctgctataccgccaaagagccctttcatgtattccgctgctgccatctgccgcagcacccacctccccattccccaagagggccggatcatcaccagcgacgatgtcttcggccacctgccggacatccgctgcatcaacggcggcatcgacgccgccccggccccgcctctggacggcgctggacaatgtgcgggtctgccgggcgttctttcggaagcgggaggcagacttccgctccacccgaaaacgcgccgcagtcgggccgcaaggtattttggactgccggacaaagaaatttcttctggcgccgttgtcatgcggtggcccgccatttataataaaggcagcaaaatcagggaggaggcgcatcctgtggcaaagcatctggacaagtttacccagcccttccgggacagccccatccccttcgccctggcggagatactgaccaacggcagcggggagatggtggatctggtgtgccgctttttgaatcctgccgcggcggcgcttctggggctctccccggaggaggtgcagggccgccgcctgtcccagctcgggtcagagcgggcgctggagcagctggcgcccatgcaggccgtagctttttccggctcctccgcctccttcccctatgtgaccgccgggggccaaaccctcaccgttacctgctatcaggtgatgtacggcacggtggcctgcctgctggatccccggtcgggggccggagcccagagcggcgcgttgccggagctcctgcccggcgcggatctggagctgaaccgggagggactgcggtgccttgcctgcagccggcagctgtgccagctgacccagtggtcccggcgggcgctgctggaccggggcggcagggccttttccgctctggtggctccggcggactggccggcgctgctccagaaactgctggacgcggcgcgggagaaacggggcgtggatcacgacttccgcctgctgcggcgggacggtggggcagtctgggtgaatctccgggcggaaatcctgtcgacccgccagggggccacggtcttccgcggcgtctttctggatatcgaccgcctccggcgggaggggcaggacctgcaggcggccctttcccggcgggagacggctctgcgggatgcggagacgctgctggaccggatgccggtaggtctctgcctgctgcgccgccgacctgacggtggcgtggagctgctgcgggccaatcaggttctctcccggctgctgggcctctcgcccgcagctctggcccgccgtctggcggaagacccgggcagcggcctgccgacgggcgagcgggaggaactgctggccgcagctgttcggtcccgggagtgcggcctgcccctgcgccgggcctgtcgggtctgcctgggcggcgggcgggaactctgcctctctctccacatgtcctgggtggaacagccggacggctcctggctggcatacatcgcctgtgccgatatctcccaagaggccgcggcccaggccgagcatcagatccgctcccggatgtacgacctgctgttagagcacacctccctcctgacactggactatgaccccgcccgggacctggcccagatccagcggcacagcaccagcggccgcaggacctcccgcaccgtctccggctatctgaagagcctgctcaccgcgtcctacctccacccggaggaccggcggcggctggcaggcgcggtccgtcgggccatcacgcatcccgggacggtctcctgcacctatcgggcggattatgaggacaccggctggcgacgctatcaggtgtcgtggatgagcctattcgatgaagccggaaatgtgtaccgtctgctgggcaaagcggaagatgtgactggccgccgggcggctgcggaacacttccggcagttggccgcccggcaccgccggcaggccagggcctgtctggcctccgcccggctggatctgaccgccggacagacattggacgccaaggccgcgtcccggcacctgctgcgcacgctgttcgaccgtaccgcaggcgcctgcctccagcagatggcctctgccctgccggaggcagaggagcgggcgcggttccaggctctcttctctccggatgctctgtcggatgcctttgcagaaggcgtgttccaattctccatggaccactggatctctaccggaaagggcggcccgtcctgggtccggatagaagcagagatggcggaaaacccggacacgctgcatctggaagtctttttccagctgtgggaccggagcttccgcaggctgcaaagcactctgttggataccctgaccaggcaggattacgagctggtcctgacagcggacgcccgctccggtgcctgccgtgcctatggaccgtccgcaggccgtctgccggagaacgccacctgccggtccctggccgcctggtatttccagcagctgccgccctcccaccagcggaccgccctgcggaaagccctctccctggaggctgtcttgtcccagctggaggcagttccctctgtggagctggtcctcccggccccggaaggagcgccttaccatctgcggtgttccccgctggaggggatgcccggcgtgctgctggtgacttgccgccgccttccggccggcacgccgtcccccgccccataaacgcagaagacccgccgcaggctatcgcccgcggcgggtcttccatgcacgacgcagcttgagcactgccagaaatacctccgtcgggatctgcacacttcccagggagtacatcttctctttgccataccccacaggacctccggttctacggggacccctcatccaatcagagcgggcaggctgagcctgcccgctccaagggtttccttccgaaaccgcttgacgccgctcccgcggcgccgggccgctggcccgggaaggagggcttactcgtccagcttgagcactgcgagaaatgcctccgtcgggatctgcacgcttcccagggagcgcatctttttcttgccctccttctgcttttccagcagcttcttcttgcggctgatgtcgccgccgtagcacttggccagcacatccttccgcatggccttgacggtctcccgggcgatgacccggccgccaatggccgcctggaccggcacctcgaacagctgccgggggatgttctccttcagcttctcgcacagccggcgggcccggggatacgccttgtctctgtgggcgatgaagctcagggcatccaccgtatcgccgttgagtttcatgtccaccttcaccagctcgctggaccggtagccggagagctcataatccagagaggcgtagcccttggtgttggccttcagcgcatcgaagaagtcgtagatgatctcgttcagcggcatctggtagtggagctccaccagattggtgtccaggtactgcatgtccttgaactccccccgccggtcctggcacatgggcatgatgttgcccacgaactcgttgggagcgatgatgttcaccttgacatagggctcctccgcgtgctcgatcaccgccgggtccgggtagttgtggggattgtccaccgtgaccatggtaccgtcggtcttgtacacgtggtagatgacggagggcagggtggtcaccagatccaggtcgaactcccgctccagccgctcctggatcacctccatgtggagcatgcccaaaaagccgcaccggaagccgaagcccagggctacggagctctccggctcaaagctcaacgaggcgtcgttcagctggagcttttccagcgcgtcccgcaagtccggatacttggagccgtcctccgtgtagataccgcagtagaccatgggctgcacgggccggtagccgggcagggcctcggccgtggggctggcggcatctgtgacggtgtcgcccacacgggtgtccttcacgttcttgatggaggcggtgaagtagcccacctcgccggcccggaggctgtcgcaggactccatgcccaggggcagcagatggccgcattcgatgacctgataagtggctcccgaggccatcatcttcacctgctggcccgtgcggagggtcccctccatgatgcggaagtagacgatgacgccccgatacgagtcatactgactgtcgaagatcagcgccttcagaggcgcattcgggtcccccttgggggcggcacgttctttacgatatcctccagcaccgcctcgatgttggtgcccatcttagcggagatttccggcgcgtccatggccggcaggccgatgatgtcctccacctcctgcttggccttggcggggtccgccgccggcaggtcgatcttgttgaacacaggcagaatctccaggtcgtgctccatggccagatatgtgttggccagagtctgggcctccacgccctgggtggagtccaccaccagcacggcgccctcgcaggcggccagagagcgggacacctcgtagttgaagtccacgtggcccggggtgtcgatcagattcagttcatagtcctccccgtcctgggcatggtaggtcagccgcacggcccgggccttgatggtgatgccccgctcccgctccaggtccatgttgtctagcagctggctctccatctcccgggcggagacggcgttgcacttctccagcagccggtccgccagcgtggacttgccgtggtcgatatgggcaatgatgctgaaatttcggatgttgctctgttttgtcatattcggatattcctccatcggccggtccacgcaaggcccgcatcaagggcccggcgcgcatcgccgttctttcaatcggaatgggggccccataaaatccgagattctatggggtggtgaggcgcaagggagcggatgcggccttcgccgccggacggctctgctccgcctgggagtctcctgtcacagggttcctccccgggccgccgctttatggggccgcggcatgttctgcgttccactgaatccagaatcgctcgtcccagaactggtcatagtcatagtgtaccacaaattcccgccagttggcgagggtctcctccagattttcctctgtcaggcggccctcctccctttgaagcatggcgagaatctcccggcagacgccgccggagtggtggatatagtcgcagtagttgtccagattcgtgacgatctccgggtccatgagatagccgtagaacttcacattgtcatactgcagcagcgtctgccctgcctggcggatggccgcaaacaccgcctccgtcctcccctcccgaatgaccttgtcccagaagaggatgctgtacgggggcaggaagaaatcgaattccgtgtccggatgctctgtgacccaccgttccgccaccgccagattggcggccacatcgtcccgataggcatctgcgggcagctcctccgccgcaatctccggccggtcatagttctccagggcggagatatggttccaccactcattccggtcccaggtgaatccctcgtcgatggtgtcgccctctccccagtggttggagagcagggtgtaggcgctgtaatacagcgtatccttgttcagcagatattggatgtcatccagcggattggcgttgtagagatagtccggcatggccgcagtcacaccgctctcatcccggatcagggtgttcacatccaggccgaagatcacccgctccggctcctgggtccgaaagaggacgttcatcacctggtcgaactcgctgtaatacccgtccgggatggtgagccgcaccgcggaggtgccgaaggtctcctgaatccagctggagcggtagttggccgccatggaggtgcccaccagcacggtgtccgcctccacattcttcgccaggcccgccatctggtaccgctcattgaacagcaccggctgccacttgtccggcacccgataatacaggcagggatccaccacgtacacaacggctccgcagaccgccagcagcaccagaatacacgccagaaggccgcagacccagcgtcgatatgcttgcttcatacggccctcctcagaagttggaatagatgaaggtggtgacgccggtaaaggacagcacacaccaaagcgtcagcactgtgagggccgcgccccgccagagcgtaggccggaagtcctccatccgacggatggtgttccggggccagaggacggcaaccatccccgccccatacagcagcaccacccgcaggatgtttttccagggcgtgaaggcgggaatcagcatctgcaccgcgctggtctcctcggcgaaaaggccctccagcagccaggccgccggttttgcaaagccgccggtgacggcccggcccagcagctccagggccccggtacagtccggtgcccggaagaacacccaggcgatgttgacaaagagaaaggtcagcccccaccggaggacaaagggcagccggtcccggcccctgccccaaacccgttccaccacctgggccaggccgtggagggcgccccacaccaggaaggtccacccggccccgtgccagaagccgctgaccaggaagacgatgagaatattgcaatacgtccggatcgcgccccggcggctgccgcccagggggaaatacaggcactcccgcaggaaggtggtgagcgtgatgtgccaccgcttccagaattccgtcacagaggcgctgcgatacggggagtcaaagttcatcggcaggcggagcccgaagagccgggccacaccggctgcgatgtcgcagtagccggagaagtcaaagtacagctggagcgtataccccaaaatcaccagccaggccgccggagcgctgagctcttccagatgtacccagccgttgttcaccacagtgccgaaggcgtccgccagcagcacctttttgatggtgccacaacagatggcgtagatacccgccgcggcgtcggaccagtccggatggaggaatcccttttcccgcagctgggggaaaaagattccgggccgcaggatggggccggaggtaacggtggggaaaaacagcccgtagagcagaagggaatcccccggcgcggggacatattccccggtatagacctccttcagcaaccacagctgctggaaggtgaaaaagctcagccccagcggagcccagcccacctccaccgcgccgccggtgaggaactccgtatacttgaatcccaccagtatggcgatgtgatagacgcaggcaagaaccattgtccggcggcggccgccggaccgggccatccggcggatagcccatgctgtcacgcagatgcctgccagcaggcaggcaatgcccccagcaccaccgtccatcctccggggcccagaaggcagaataccgcggaggccgccgccagcatcgccgcacccgctcggggctgcgccgccccgctgtcaggcacaccgccagcgctgcggccagaaagccgaaaaaggccagagactgaaagctcatctggtcttctccgtcaggccgctgagacgggcatccgcggtgctcagcacctgggtcaggctctgacaccgtccggggtatgcggcggtcagggcctcgttggacaggtccgggaacgccgcctttttggccgccagggaccgcaggctccgggtgtactggatctccgagagcttcatgtccgcctccgctgtgcccatggtgcaggcggccgggtccagagagaagtacgcctcgttggcgccggcggtgcggtacagatggcggtacagctggtacaccgcgctgcccagatatccggcagcggcgttgatggacgccttgtcgttcagcttgcccagcaggccgaacagcacccccacagcgccggagagcagcttgctctggagcgtggccagcacgctgccctggaggatgttgcccggttccgcagcgttcaggatctcctgctccgtcagcatgttcccctcccgggacagggtcctgcccaggatgaagtccgcggagacgtggtagtaatcacaggccttcaccacaaaggccaggcccggttcccgaatgccgttttcatagtggctcaacagggcctgggagattcccagatcccctgcggcagttcgctgggagacgccccgctcctgccgcagcagggacagggtccgtgaaaattcagttgtggaagccatcgttctctctccttcagagttaaatacataacgtatagcttaacaaatacgatacggattgtaaagaaaaatcccacggattcagacatttttcgggggaaggcgctgcggcgccttcccccgctgtttccttgccgtccagctcagaacaggcccacctgccccagcagcacgtctcccccgatgctgcgcacctggcgggcattctcctcccacaagcggtccgtcaccgccattttgcggatgatgtcctgcaccgtggcctccagcgcagacccggcccggtagtccgcctggaagatataatccacccggccctttgccagcaggtcctccacaccggcgcggttgctggcctggtacacggcgatggcctggccgccgtaggcccgcatcatcttcatgcagggcacgtcggaaaggccgtcccccatgtagatcatactggtgaagggcacccgcttgctgtcgtcaggcatggaggcgtttagatcccggtcgttggacacgtccagcacgcccttgttgatccggtagacgaactgggtcttggcggtgaagttcaccgccagcttgggccacacgggcacaccgctctcatcgtagtaaaactcgctggcatagatctccttgaattccccgctgatggacgagccttcaatgatctcccgcaggccggaagagatgatgtagtgctccacctggacaccctggccggcgccgaagtcgttgatccgccggaaccagtcctccacaccggggaacagcacgatgctccgccccttctccaccaggtccgtccgggtgaaaggtcggttccgccgcgccgcctcccgcagcatggtgtacatataggccaggataccgtccatccggttcctgcggccgaagccgttggcctccgcccagaactctgcgggggtcatccccagggaggggatgaaggcgtagtcctgcatatcggtggtgcagagggtcttgtcaaagtcgtacagaaaggccacgatgggctgttgcttcatggctgactcctccaatcaaaagacgttgagcgccgggaccgggaaagaaaaaagcggctcctgcgagccgctttgatcgttcagtcatcgccgccggagtaattgcggccgaacttcagatcgttgagattgatgcggcgggtaggctcatccacaggatcagccgcaaaggggtccccctccggatagtcatcctccgccgccggagacgcctcttccgcttccgccggggccgcttcctcctccacgctctgctcgctgaaagcggccagcaccttttcctcgatctgctggacggcctcctccggctcctgctgggaaatcggctccgccgcctccaccggcagctcgggcagctgctccaggaatttcagctccttctcacagatctccctgctggcggcaatgaactgggccagatcccgctggccctggtgcagccgctcctcggcggcctccacctcctggcgcagctggccgatcttctcccgggcgctggtctccgcttgggccaggatctcgtcccgcttggcctctgcctcgtggacgatggagtccgccatcttctgggcggtcagcagggtggcgcgcatggagtcctcggtggcacggtagtcctccaccttttccaccaggaccttcagcttggccttcagcgccgcgttctccttgtagagcgcggtgtaatcatcggtgagctcgtccagaaactcatcgaccatggccatgttatatccgcccatcactgccttggaaaaggcgtgggtggaaacttcctgtggtgtcagcatagtgcgatgttaccccctcgtgtccgctcagaaatagaggccgttgttctccagctcgtcgatcagatcgccctcgatatccacatgatagggcgtgatgatgtatgtattggcagccaccttcttgatcttgccctcgccggcataggccacgccggacagaaagtcgatcagccgccgggcgatatccttgttggtggactccaggttcagcaccacggtccgcttgtccttcaggtggtccgcgatctcggaggcgttctcgaaccgctccggcttcaccagcaccactttcagctgggtggtggcgtggatattcaccaccttgttgcggcggtcctccaccttgagcttccggtcctcaaaggcgttttgccgcaccggctcctcaaagtcatcatactcctcgtcctcatcctcgtaggggtgggtccactttttcagttcgtccaataagctcataatagcctcccatcggagccgcgctccggtctttttcagttgtaatggcgggcgccgaagatggcgctgcccacccgcaccatggtggcgccggcacggatcgcatcctcatagtcgccgctcatgcccatggacagatattctaattcattatgaaacaatttttggttcatgtcaacataaagtgcctgaacttcctgaaaataccggaaattggcatccctctgcgcgtctgccgggggaatcgtcatcagtccccgcacccggacatgggtccgctccagggcggcctccgctgcggggaggactttctccggtgcaaagccgctcttggcagcctcccggccgatgttcacctccagcaggatgtcctgcaccagcccccgggccgcggccactttctcgatctcgtccagcagctccagagagcccacggactggatcagggccacatggcccaccacctgcttgactttgttgcgctgcaggtggccgatgaagtgcaggggggcgccgtcgtaggcgtgctgctccagcttctgtaccatctcctgcacccggttctcccccagggcgtcgatgccggctgccacggcctcccggcaggcggcggcatcgttcatcttgctggcgcccaccagcaggatctccttcgggtcccggccggcctcccgggccgccgcggccatgttcgcccggatccgggcaatgttctccgcaattgtcatcagcgttccaatactcctttccagcggccgccctgcggccatctctctgtcagctgccaatcacctttccatcatacaggtcataggcggtgatgatcacctcgtcccccgcccggaggcgaatctgctcctgggtcttgctgacctcctctgccgtgtccagcgtggagcgcaccagggcgaagtcatctccgctgtacagcacgtccaccggcttgaagcgggccttcatgcccaccatgcagtagacgccggtctcgctcaccacggactcgttcccgtcctcgtccgtaaccgttcgctcccgcacccgcagggcctccttgggcactcggatgcccgtggtggtctgccgaataacctcggcgctctgctggcgcagcagcgtcagctctgataaataggtgtccccctggaacaccgccaccacccggccgccttccgcctcgctgatatgggtcagcttcacgctcaagtcccggcccacgcccttggcaaagcgcagcttcagtctcccgctctcctgcagggtctgggcctcgctctcctccagggccgtcacatagtaccaggtgtcccccagcaccagtttgcccacccggttggagcgcagggactcgtccggctccagggccgccagggtcctgggcgtcagcgtctccaggctctccggcgttagaatgttctcatatccgtccaccacggcggaatagagccccgcctgcggcgcggtgatctgccggacagagcttcccgcctgggcccgcaggctgctcaactggctctggagctccgccatctgggcggacaggtcctccgtatcggaatacgtgtagtcccgcttcatcaccaggctccgcagctcggctccgcagtcctccgccgtgtccagccggtccgccgccagagcgccccggtagtcgcggatcgtctggaggatctgggcgtccagtcgcagagagacctccgcccccagcgccgcctcctccgcgtactgcaactgttcgatctgggtatggagggattggatctccttctggcggtccagcgtcgcctggtccgcgtagaccagcgccaccacgccgccgtcgctgatccgctcgccctccgcccgctgcagctgcagcaggccgctggtgtcgtccgtcaggatcgcctcgtcccgcaccacatagccggacagcaccgtggacatctccacctgatactggtaggcgatggtggtggtcagcgggtcgccgaaatagcgcaccgcctgaatcgagaaataggccagcacgcccagcgtgaccgctgccagcaaaagttttgtgccaagggttttctctttcatggttacctctttgtctctgtccgcgaagccttcccggccccatgcaggaccctctgcggaggcgcagacctccacaacctccagctccaccgccggacgcaccggcgcgatggcggaggtcgtgtgcttgaaatgattttctgcccgccagttctcatttccccaggcacggcgggctttgcccgccgtgctcaaggttttggtccgcaaaacgtgatcccggcctaagtgccgccctttaggcggcgggcctcaaaacgggtccgcaggccgctcatgcgcccgcgacggccggttcctcaccctccagatccaccggccgcaccggcgcgatggtggagatcgcgtgtttgtaaatgatctgctgccggccgtcgctgtccagcaccaccacaaaggcgtcaaaccccgcgatggtgccccgcatctggaagccgttcatcagaaacatggtgacgggcagcttgtcccgtctggcccggaggagaaacaggtcctgtaaattcgcttttgtctgcatatatgtccgctccttttttctgtatgagtcggacgatttccctgtctcccgtccgctcaccgctagaatacgccagcggcggccaggatttccgtcgaaacctggagggcccgggcaaaatcccggtctttttcccaccagatccagtgaatgtccggatttcgccgcagccaagtcagctggcgcttggcgtattgccgggagcggagcttcacctccgccacggcctcctccaccgtggcggtgccgtccagaacccccaggaactccttgtatccgatggcctggagagccgtggcctcccggggcaggccgctttccagcagctgccccacctcctccagcaggcccgccgccaccatggcgtccacccggcggtcgatcagggtcttcatgtccgcccggtcccggaactggaggccgatccacacggcgtcgtaccggggcggcaggtcccttgtctccgcgttgtgggcggagatggtctttcccgtctcccggtagacctccagcgcccggaggatgcgcttctcatccgccggatggaggcgttccgccgcctccgggtccacctgccgcagctcctccagaagcgggccgatgccctcccgggccagctgggcctggagctccctgcggacagcgccgccggcgtggccgccggcgaaggtccggccctgcaccaccgcatccagccacagcccggtgccgcccaccaggatgggccgctttccccgccgcagaatgtcgtccacgatggggacggccgcccgggcgtaccgggcggcggaccactgttccgccgggtctgccacggcaatcatgtgatggggcacgccctccatctcctcggcggtgggggcggcggtgccgatggtcatgcccttgtaaatctgcatggagtcggcggaaaccacttccccgtcataccgctttgccagcaggacacccagcttcgttttgccgcaggccgtcggccccaccacacagatgatcttctcagccatcgccgtctctcctctcgcctgtcaaggctgttccgcttctgatgcatcgatatactcactgtatacgatccgctcccggatgtaaagggggccctccgcaagcggacagcagaagcaccagtgccagcgcagccggcaatctcccccttacggcagccgcctccttttcagaagtcctccgccagcctgcgggccttctcacaggcctccgtcaaaatctcctccgtcttggcgggatccaggtccagtccgccggcaaacacatagctgaacgccgggatgccgaacatggcgcacagctgcttccagtacaggacacccagactctcgggctgctccagatccccgccggaggtgagataagccagcttctctgcccggcaatccccgtggcagccgtcggcctcgtagtgataggtcaggccattggcggagatgtactcaatatacgtccgcagggccgccgggaaggtcaggtcccagaagggtgccgccaccaccacccggtccgcggcccggaactggcgggccagatcatacaccggcgcatcgaagcaccggatccccgccagggcgtcccggtcgttcagcatctccggcgcaaagggcttcagcgccagcagggcctctggttccacagtctccacctcggcctccggatgcctggcctgccatgcgtccaaaaacgatctcgccagcaccagggtgcgggattcctcccctcgctggctgatgcagccgttgacaaacagcagtttcatgcaaatcactccttctcctccaaaagggtggtaatgatgggcttcccctcccggtccagcaggggcgtcatcccgccggcatggccggtggaatgccacaggtagttgaccccggtctcccggtccatccagacagagttttcctcaaagccggtgctctccacactggtccgcacaaaccgtttttccttttttgccatataggaaacctcctgaaaaattcgtcactcccatctccgccaggaaaaagggctggggaaaaccctgcggtttttcccagttcgttcgccgcgggcgaacaaagaaatctcaatcattttcggcagggcgtgtacctgccgaaaatccgttgacctgtgcgcctcgggcgcacacaccagtgaccgacgtcactggtgtggggggaggtcaaggggggacgcagtcccccttcgaagtctcacgcccgcttgaacatcttctccagctcgtacttcgtcagcttcaccgccaccgggcggccgtgggggcagtatttgatctctccgctctgcacccggtccaccagcacccgcagctccgccggatcgctgacccagccgcccttgatggccgccttgcaggccatggtatgcagcagcgcctcccgcttttcatccggggatcttccggtccgcaggcgctcggcaaactcctccagagtgggcaccgtgtcggcggcgtcgatgtccgccggcacctcccgcaccagcagggcgccggccccgaagtcctcgcaggcaaaaccgaactgctccagcaggggcaggttctccagcagcagcgccccgtcctcccggcttaactccgccgcgatgggggccagcagcgtctgtcgcatggggggctcctgagcatttttcagcttgtcaaaattcatccgctcgtgggcggcgtgcttgtcgatgagccagacgctgccgtcctcgctctcgcagatgatataggtccgcagcacctctccggcaatccgccagggtgcctctttcgtctccagaacagtcgtctggcccggtagatcctccgtcagcttcagccgctccggcgggatggcgggcacaaaggggcggggagcagattccggcgaggtcgtcttttctgcagggacggacactggggcagaggtccagggggcggagggagccgtccgctccgcccgtggggcggtcacggagacaggcggtctgcccagcgcacctttgttgcaggagggtgcaggcgggctgctttgctgcgtgtctggcggcgacgtcacagaggcgggcgcccttcccagagcgccctgggccgcggactctgagcgcttggtctggtaaaaagaggtctgcccgctgtccgccacccgggcgggcgcccgcagctcggtgttccaggcgggccgggccggagccgcgggctggggagcgggctttgcaccgccctgccggaacgtcttggcgtccatggtctggaagaagtcctgccgggaggccgccgggagccgcgcctcctgcgcgggagcggcggcgggagcgccggtcttgcccagggcatctagcaccgtgtggtagaccgcgtcgaacacatcgtgctcccgggcgaacttcacttgagtcttcgcggggtggacgttcacgtccaccgccgtcaccggcagggtgacggacaggacgcagccagggaacttacccttcatgatctggttgcggtagccctcctccagcgccgccgtcagcagctgggacttgatgaaccggccgttgacgaagaacacctgcatggaccgggagccccggcccatcagcggcgcggtgacaaaaccggagaccgtgatgtcccctccgctgccggacaccggcaccagcccccgggcgaagtcccggcccagggcagcgtagacggcggagtccagctttccgtcaccgggggtcagcagggcctccaccccgtccttgatgaacttgaaggagatgtccggatgggacagggccagatgctgcatgaggccgttcaccgccgcagtctccgcactgtccttgcgcataaacttcagccgggcgggggtgttgtaaaacaggtcccggaccgtgatggtggtgccctccggcgcaccggcgggctccactgcgccgggcacaccgccctccagatggagggcggctccctccgtcgtgccggtttggcgggtgaggatgtccacccggctgacggcggagatggcggccagggcctcgccccggaaccccagagtaccgatcttccccaggtcctcctccgtccgcagcttggaggtggcgtggcgcaggaaggcggtggggagttcctccggcgcgatgccgcagccgttgtccgtcacccggatcatgcccatgccgccccggcggatctccaccaccacggcagagctgccggcgtcgacggcgttttccaccagctccttcaccacgctggcgggccgctccacgacctcaccggcggcgatcaggtccgctacgtgggactccagttgttgaatgtgaggcatattggtttcctttctaagctcagagcagcagcacggcgacgatgggaatggtcacgatggacgccgccgtggtcaggaaggtgatctgtgccatgcactcggtgtctccgccgtactccatgctcagcagcgtcccgttcactgctacgggcatggccatctgggtgacagcgatccccagcaccagggagtcgatccccagcgcccggaggaccaggcacagggccaccggcagcaacagcaggcggatggccgtcagcagccacagcttgggagagcgcagcacctgtccggctgacatgcccgccagcagggagcccaccaccagcagggacagcggcacggtgatgtctcccacaaagtccagcatctcgcccaccagggccggcggccgcagccgggtcagcgccagcaccaatcccaggacagaggccacgatgcagggggtgaacagctgcttccagcggaagcgggcggcccctgccagcagcagcgggcccagactgtaagacaagagattgaagggcagcgccagaatggcggcatagaacagtgcgccgtctccaaacagggccaccgctacgggatagccaatgaaccccacgttggggaaggccagggcataccgccacacgcccttctgcccctgtgtgcccggcaggaaccggggcaccaccagggcaaagaccgcctccagcaggtagaacaccacgccaacctccaggatggagaggatggtccccagctccggcagctcctcgccggtgatcaccgccgccacgatcatggcgggcatggtgatgttcagcagcagcttggagaccttctggtccgcctccccgcccaggtaccccagccggttggccgcatagcccgccgcaatggcgaacaggatgaccagcatctcgccaaatacgtcccaaaaattcatctgtccctttctcccctcatcattccggaattcggttcttacgccacaagggtccaagcggagagggcgttggccgccgcatggagaccgatggacgtccacagggtgccggtgcggtcatagacccacgccagcaccagcccgggcaccagatactggagcatcagcaggaaatacgtgatgtcccggttcaccaccgcgaactgccacacatgcagcagggcgaacagcaggcagctgaccaggtatcccaccgccgcgctcttgcgccggagattcccgaacaccagtccccggaagagcacctcctccacaaagggcgccaggaaaatgacgatcagcagcgtcatgtggggcgcgtcctcgatctgggcggagatggtggtgtcgttcaggttggtctggttggataccaccagtcttgtcaggcggtacaccagctcgttcaggccgtacagggccaccagtccgatggccatgaacttgcaggccccgcccaggttctctgcaaagtgccgggaggtccgacccagaaagccgtggaaaatgatgaccgtggcggcgaagaggatgtagtaatacaggatattctgcaatccggtgctgatggtcactcccagcagtccgccgatcaggcggaacagcggggttgtgacaaagggcagcaccagtaggtagatcacaaagagcaccgtgcccgcgatctgttcccccgccgacatataggcggcgctctttcttcttggcatctcgttccctcccggttttcgtccggcttctgtttcagctcgttttccccggcgggcggatccgccggggtcttcttttgatccgctgggcttgggcggcgcgtgtccgcccgccgccaggcccctcatttccgcggaatcccctgtcccggcctgaaggccgctctccgggcgccgtcagcgcgtccggtcccccgcggcagagggcgcatcccgccgtgcctgcccggccgggtgctcagttgagcttctgcttccactcgtagatcaggctcatcgcctcaatgggcgtcagcgtgtccggctggcagcggcggagggcgtccagcacctccccctcgccgatggcggtgagggacacctggtcctcctctttccgggccgctacgtactgaacgccgttctcctcctccagctctttcaggaccgttttggcccgctggaccaccttgtccggcagccccgccagcttggccacctcgatgccgtagctgcggtccgccccgccggggaggatcttccgcaggaagatgatgtcctccccccgggtcttgacggcgatgttgtagttgaccgtgccgggcagggtgttctccagctccgtcagctcgtggtagtgggtggcgaacagggtcttggcccccagcagcttcttgtccgcgcagtactccagcaccgcccgggcgatggacatgccgtcaaaggtgctggtgccccggccgatctcgtccagaatcagcagagagtgcttcgtggcgtggcgcagaatgtccgccacctccgtcatctccaccatgaaggtggactggccggcggacaggtcatcgctggcgccgatgcgggtgaagatccggtccaccacaccgatgcgggcgctggccgccgggacgaaggagcccatctgggccatgaggacgatcagcgccacctggcgcatgtaggtggacttgcccgccatgttggggccggtgatgatggccacccggtcctccttctcccccatgaaggtgtcgttggggacgaagaggctgtccttgagcatctgctccaccaccggatggcggccgtcgtggatctcggtggccccagactcgtccaccgtggggcggcagtagtggttccgcaccgccaccgccgcgaaggacaccagggcgtccacctccgccaccgcggcggcagtccgctggatgcgggcgctctgggcggagatctcctgccgcagcgccgtgaagagctcatactccaatgccaccacccggtccgaggcggtgaggatctcgtgttccaagtccttcagctcctgggtgatgtaccgctccccgttcaccagggtctgcttgcggatgtaggtgtccggcacctggtccttgaaggagttggacacctcgatgtaatagccgaagaccttgttgtagccgatcttcagggtccggatgccggtgcgctccttctccttggcctcgatctccgccaggacgcccttgccgccgttcatgatgtgccgcaggcggtccacctcctcgtggtagccgtcccggatgaagccgccctcccggacggagaacggcggctcgtcgcagatggccgcgccgatgtgtgccccgatctccgtcaggtcgtccagctccccggccagctccgccagccgtccgccggagaaggccgccagctgggcccggagggcgggcagccgctcgatggcggagcggagggacaccatgtcccgtcccccggcggtgccgtagacgatgcggccgatgagccgctccatatctcccaggcccgtcagggcggcgatgagctcctcccgcgccatggtgctctccaccagggcggccacggcggcattgcgcttggcgatggcggtgacggacagcagcggccgctccagccagctgcggagcagccgcccgcccatgggcgtcctggtcttgtccagcacccacaggagggagcctctcttctcccggtcccggagggtctccgtcagctccaggttccgccgggcggtcaggtccaactccataaaccggccctgctcgtagtagtccaggtcgttgatgtgagagaggtccgtcttctgggtctcgtacaggtagtgcagcaatccccccagggccatggccgcggccgggttggtcctgggcaggcggtcaaacgcctcctccccgaactggcggcggatgtttcgctccgcctccgccaggcggaagcggccctcgccgccgttttccacccggcagcggaacttctccgtcagggcgtcggtcagggctttttccgaggcggccccgtcgttcaccaccgcctctgccggggaaaagcggcccagctcgttgacgacgtgctccacccggtccgggccggagaaggccgtcaggtgggtcttgccggtggagatgtcgcagaaggccgcgccggcgttctggctgtcgatgtagatgccgcagaggaagttgctggccttctcctccaggcaggcggcgtcaatcaccgtgccgggggtcaccacccggatgatatcccgcttcaccagccccttggccgttgccgggtcctccatctgctcacagatggccaccttgtagcccttggcgatgagccgggcgatgtaggcctcactggcgtggtaggggatgccgcacatgggcacccgctcctcctcgggcttggcgtgcttgccgtggtcccgggaggtgagggtcaggtccagctcccgggaggccagcttcgcgtcgtcagcgaacatctcatagaagtcgcccagccggaagaacaggatggagtccggattgtccttcttgatctccaggtactgcttcatcatgggggtgagttcggccaaaagggtcacctcattctctttctatcaaaggatttggattcgttttatgggggtgcgtcccatgggacgcgggaaatcagccatgtggatggctgggctgggcaggccgccgaacggcggccacaggggtctggctcccgccgggggcattgtccatgcgggatgcgccccccattttctttttgagacatcaaaaagaaaatgcgccgcgcccggtggaaaagaaaaaatgtctcggcgggtcggtctgcgcaggcgcagacctcctgccgccggcgggggaaggttggcaatcccgcgcggcggtcagagacggaaacgcccggcccttggggaaaccttcagcccggggaagtctgggatacacgctgcgctgattttcgctgccgctggccggtggttgatgaaagcctccgcagcgggccgatgagggcatcggcctctacaaccgcccgggcagcgcgtagcgaagcggaacgcgcggaaagagaagctggtcaaatgcgttcttgcaccccgacaacttccgcaccatccgccacgggacggcagtcggggaaatcgcagaagagcatagcgtgcccgaaggcaaggccaaatcggagcaggcactggtacgccgacccccgtacgcgcggagggccactgcaccggagcgcgcccggcgcctttttctcttacaccgggcgcggcgcgttctctttttggcgcaaccaaaaagagaatggggggcgcattgcccagctggcaccccagctgaatcccccgggcggttgataaccgcccctacggtcctgcaggggtccggcggaaatccggcgggcggacacacagttccgcccctaccgctcccggcagaccagctcatccagcgacaggccgtagaaatccgccagggcaatcagtgtggacagggtcggttcccgctctccacgctcatacgtctgataggcccgccaaccgatgccgatgatttttgccagctcggtttgtttcaggcccctttgctttctcagttgaagaaggtgttctgcaaacgtcataattcctcttccgctcttgacagacacaaatatgtctgctatgatacgtactataaaagacacaatcgtgtctgtcaaacaaattcaggagtgatcccctatgtccgattacatcgacatcctgctcaccgccctggaggacgagctgtacccctctctgggcaaggactacttcctccccctccagcaggcgaacgacgccttgaccgcgctttccgccaccctcaccgatcagcagcgtgcgctgctggattcctatgaggacgcctccgccgccgcaggcagcgcctatcaggacgcctacgcccgcagggccttcctcctcgcgcgggaggtctaccgttaaacggcctcgccgtacagcgcccaggtgttgctgccggtgacggccacatccgcgaactgcccgatcagggccttgtcccctttcagccgcaccagacggttgccctccgtccgggaggtcagggggtactccgggtcgtcgctctcgccgtccaccagcacccgcaccgttttgcccacataggcggcgtggagcttggcggacatattgttctggacctccaggagcctgtcaaaccacttctgcttctccgcccgggtggccgggtccggcatggccgcggccttggtgccggggcgggggagtagatgaaggtgaacagggcgtcaaaccccacctcctccaccagagacacggtgtccatggcctccgcctccgtctcgccggggaagccgatgatgacgtcggaggtcaataccagcccgggcatgacccgcttggcgtagttcaccagatccaggtactgctgccgggtgtagcggcggttcatctctttcaggacccggtcgttgccggactggaagggcaggtgcagctgcttggccacatgagagcttgcggccatcacgtcaaacagccggggcgtggcgtccttggggtggctggacatgaagcggatgagatattcccccgggatccggtcgatgtccgccagcaggtccgggaagtggtaatccaaatccagatcgttgccgtaggagttcacgttctggcccagcagggtgatgtccttgtaccccgcctccaccagctgccggacctccgccagcacggcctgggggtcccggctccgctcccggccccggacatagggcacgatgcagtaggagcagaagttgttgcatccgtacatgatggagacccaggccttcacgcccttctcccgcaccacggggatgccctcggcaatggtgccgtgctcgtcctggacggaaaagacccgcttcttcgtctcatacacctgccacaaaagctccgggaacttccacagggcctgggggccgaacaccagatccacgtggggataggactttttgatccgctccgacacccggggctcctgggccatgcagccgcacaggcagatcacctgctccggattctccttcttggtgtgggtcagggcgcccaggttgccgaacacccggtcctccgcgtgctcccggatggcgcaggtgttcaggagcaccagatcggcctccttcgggtcctgggtgagggtgaagccgcttgcctccagcatccccatgagcttctgtccgtccgccacattctgctggcagccgaaggtgtccacacaggccgcggggtgagcctcccgggcggcgaacaggccgcggattttctcctcaaactcccgctggcggtccaggtccgcctgggggatcaatacgttttcgcgttccaaatcagttcctccaaatgcagatactttaactaaaatatcatagcacaccagaaaacaaagcacaagcagaaacctccggcaggcagacagcggccccgccgggaacttcccggcggggccgctgttgtgtcacaggtctgccagcagatccggcaggtccgcggggcgggcggccacggcgtccgccgccgccaaatccacggacggggcgccgccccaggcggcggccacgcagaccacctccgccgcccggcccatggcccgcagggccgcctgggcattgcggccgaaggcgatgtccccggcgtggtccccgatgtaggcgaagcgcccctcccgaagccccagccggtccaggcaggccaggaaggcggcggggtccggcttctgacgggcgaagtccacgtccgcgtggcccaccacggcggcaaagcagtccgccgcgccgtgggcggccagggcggcgcggatgttgccgctgtcgttctgggagcagatgcccatgggggccagggcggccagacggggcagaacctccaaaagcccgccgaagaggggcggcagggtccggtccgccagctggcaggggccccacagggcccccgcctcgtccagccggtccgccgggacgcggagggcgtgctggtacagctcccgccagttgcgccagcggtagttggcggcctgataggcggccagggaggaaagcgcctccggcagcgggtccagcagggccgggtccaggcggccaaggacggccctggtgacggcgatgttcttcaccggcgtgttggccagggtgccgtcgtagtcccagagaatggctgtgaacatgggtgccctccttctatcgcttgtctgtgcggcccgctaaatagtccaagctgaccttgtagtaatctgccaatttgaaaaagacttccagcggtatcttgatctttccgttttcgtagtctgagtaggtgttctgtttcacaccgagatactccgcgatcactttctgcggtgtgtccgaatcctctcgcagttccttgactctcctcaaatacatgatgccatcacctcaagcgataacataccgcatcggtgaaagcgatattgacttatatcggtgtagccgatataattttcatgaggtgataaaaatggctctatatgagaaacgggatgacgtgtactgcggctcctgcggccactttacccggcactacatctggcgggacgggcggcaggcccggaacgcccccaacgggtgctttctgcccctgagcctgggccactgcgcccatccccgcatgaaggaccggcgggaggatcagtcctgccccctgtggatcccccgcaccccggaccaggacccgccggacacccggctgccgggtgcaaacgcgccggaccgctgagagcggcccggcgttgttctatcctcggttctccagcttccgcagctgggtctggaacgcctccggcaggtcgcaccacagctccaccagctccccggtccggggatggagaaaccgcagccccaccgcatgaaggcactgcccctggaggcccggcacgggctttttcgccccgtacaccgtgtcccccagaatggggtggccgatgtgcgccatgtggacccggatctggtgggtgcgcccggtctccagtcggcactccacataggtatagccggggaaccgctccagcacggaccagtgggtcaccgcgctccggccgcccgccaccaccgccatcttcttccggtccgccgggtggcggccgatgggggcgtccaccgtgccgctgtcctcccggagattcccgatcacgatgcagcggtaaatccgggccagggtgtggtcctgaagctgggcggagagcttctggtgggcgaagtcgtttttcgccgcgatgaggaggccggaggtgtcccggtcgatccggtggacgatgccgggccgcagctcccccccgatgccggagagggagtccccgcagtggtgcagcagggcattgaccagcgtgccgtccgggtggccgggggccggatggaccaccagccccttgggcttgttcaccacgatcacgtcgctgtcctcgtacaccacatccagggggatgtcctggggcgccacgtccaccggctccgggtccggcagggtaacggacacggcctctcccccgcccaggcggtagtttttcgccaggggctttccggcagcggtgacccgcccctcctcgcacagccgggcggcggcggagcgggtcacgtccggcagctgcccggccagccaggcgtccagccgggtgccggtgtcctcaggattcacttggagcgtccgcgtctccatgggccttgcctctcttgtcgtatttctcgtagaaccataggtaatagattaccgccagcacggcgccgcacaccacgcagatgtccgccacgttgaacaccggataggagggccagaactccaggtggaacatgtccaccacgtaccccagccgcacccggtcgatgatgttccccacgccgccggacaggatcaggaatcccgccgccacccccagggggtgccggacgatccggcggagcaggaccaccgccaccgcgatcacgatgacggaggtgaccgccaccagcagccagcgcataccggagaagctggaccaggccgccccgtagttgtggacggtccgcagctctaccagcccgggcagaaagggctgggcctcccccagggggatgttgacggtgacatagtgcttcacccactggtccaggcccagcagggccagggacagcgcggcgcaaagggcatacagcatagttttctcctcaaatcagataggttttcaccaccggcacccgccggaggaccagccacaccagaaagccgcccccgaaggccgcggccgccagcaccggcacgccccagacgggcggcagcgtcccggcggagaggcccctgcccgccaggaagtccaggaagaacaggtgcgtcaagtagatgcagaaggacgccttggagacggtctccgccatgggccagcggtcccggttctgccaccgggcggcgcagaagccgtacagccccgccgcctgcaaacagacgccgggggcgctcccctggaggaacacctgatacagcgccccggttttgacggaggccgccagcgtcaggccgaaggtcagcgccgtgcccgccaaatacagccaaacgaaggtccggggcctgtggcggggcgcctcctgagtcaggacatcgcccagcacaccatagcccacggcgcaccaagtcaggttgatggggtactgggcagggatgccgccgacgagggacaggggcgggaagaatttcagcgtgggggccagacaccccagcacgaaccagatccccagagcgtagttcagcagccgccggtccgccgccgccacaaggcggcgggtcaggggcagcaccgcgtacaccagcagaatgatgtggaggtaatagagatggttcttgtgatggaacagcaccagattcagcgccgcctgccggagggccgtccgctccagcacgcccgcagcgcgccagccccgcagcagctccacaccctcataggctgcggcccagaaaagcagggccgccaggatgcgggggatgtacttcgtccacacccgccggacggtgacctccttttccggcggcagcagcagcgcgccgctgcacaggaagaacaccggcaccgcgctgcgcagcaggcagttccagaacagggcggaggtccacccaaaggaccccggcgctcccgcaaagcccccggcggcggaggcatggatcagcagcgtgccgaagatggcagcggtcttggccgcgtccaccggcacgctgcggcgctgtgtcagcgtctgcatccgaccatctccctcattggacagatcgagcttgccgacaacagtgtacacggtttggcagaaaaaagcaaccgccgcttcacgccctcctgcggcgccgccacaggagccagataacgccggagagggccgtcagcgccccgcccgccgccagggacagccagaagcgcccgctccccggctgccacagcgcgccgcccagcacggtggcgcaggcaatccggggcaggccgcccagcagcccggcggagagatacgtgccgtagggcgtgccggaggcccccagatagaggctcaccacgtcccccggcgatgcccccgccagccgcagcagaaagacggacagccacgggttctccgcctgggcccggcagacgcccgccacccggggaatccgctccgccagggcctccagtcccccctgctcccgccgccccaggaaaaaggggatggtctgggccaccccggtgccgcagaggttcaccgccagcgccagggggaagggaaacagcagtccccccgccgccgtgagggcggacatgggaaagcagacggagaggctcttgagggcgtacagccccaccaggaacgacgccgccagaaccgtctgccggggggaaaaggcggcgatggcctccgccgtcaactgatggcggaacggccagagggcggcggcgcccgctgccagcaccagcagcggcgccccgtaccgccagacatgaaaggcatgtttttccatagccgtcctcccgcccgcgtcagatagggctagtatatgcggcgggcggaaaaagacgaagaggcagccggaaatccggctgcctctttctgcaaatagtgacagaattcccctggcggtcatacaaagggttcgtcctggggcaggacgtccgtggaaagttcggactccccagtggtcccggtgccggtctgcccttccgctgtctgctggccgtcctgctccggcgtctggatggtccagccattatccggcgtcgtgggttctgtaggctctgcggggacatcagggtcctggggctccgtgggctccaccggcgtggtgggctcggtggtgtccgttgggatctgggcgccgccgtcggcgggctctaccgccgggccccggaggatcaccttattgcgggacttgtagtcgctggtggcctcgtaagtggaggagatcagcttgccgttggcgtcgtagacattgcggtatgtccggtacttgtacccggtgtagggcgtggtcttgaccttctccgtgcccggcgccagggtggggtcgtcctcatacaccgtctcatagggcgtggtggagaggtgctcgttggtcatcttcacgctggtgccgtccacattggtgcccaggatccggaccgtcaggtaattgttttcatagatggtgacgatcttgatggggtacagggagttgttggtgaacttgtagtccggcccgccccaggacaccgtggcgtccatgcccgcggtgatataggcggggacgtagcggtgggcgtaccgctccgtgatctccaggttggaccgcaggcaggccaggtacagcgtggaggaagtctggcagatgccgccgccgatctcgtccaccgtctccccctggacataggcgggagccgcctgatagccccgggcggcggtccgctggcccaccacgtcattgtaggagaacacgtcgccgctgttcatcacatactcgttgatggatgcggcggacagcttcacattggaccggcgggcggaggtgccgcccacatgggtgcgggcctcgcccagcacgtcccggaacagcacctgctccagctcctccgccgtgacggcgggcagctccacctgggcggggacggtgacggtctcgccgggcgcggctgcgtccagcagccgctgggcctcgtccacatcgaagtccgctccggcctcctccggtacgatggcgcccgtctccttgtcataggaggcgttcttcaccacgccggagcaatcgtcgtagatctcctgggcggtgagggtcttggcgggaaggatccgagcgttgttcacaaacacgctggccgccgcgccattgccgctgccagtccatctttcctgtgcagtccgcgcaagatctgcggcggacacggacagtccgttcagggcttttgtgatttcgacggcatcctccgtcacctcgtaggaggcgtcctgggcctcccgggagaactgctcactgagctgttccatttttacctggaagatatcctcctccggctccagcacgacgcccagttgtccatctgctccgaccaggcaggcaagatactcccagcccttgacaaaaaagctgctccggccctgcacggcatcaaatgcggattgggcactgacctcatagtccagttcctctgtgatgcccagctcccgataggtgcatacggcgtcggggtctgcgccgtacagcatatctccctccggcgcggattccccatccccggtctcatcggccagcggtaaataaaactctacggtttcctccggaatctcctgccgcagccgctccgcggcctgctccgctgtgaggcctgccacgtccacaccattgatggtggtgttagggtaaaatatatccagggaattggcataggcgcacaggcccacataggcggcaagcaataccgccacaataactcctatgataattatcggctttttgccgccggttttcagccgcttcggcgcggtggcttcgttcgtattcggttccatgaagcccctcctgttgttctgtcggatcgcccagacaagccgtgctgtcctagcttatgcattcaggattttattttagcacgttttttctggaaaatggattacaatcccgtaacaatcagaagtttcaggcctctttccgacgctgtttcggaatgcggagcgtcagaacgatttcgtcctctgtctcctcccgctccgtccgggcgtccacacctgcgtcccgaatcagccgcagcccccggtccacactgttcaaaaacaatcgcacgtccttgatgatgtacgtccgccgtcctgcgggcggcgcggtctggagggctgccagccgccgctctacatactgctccgtctgggccacattccagtgcttcgccgccgcctggcgcagggcggtcagccgctcgccctcgtcctccagccgcagcaggcagcgggcgtgacgctccgtcaatccgtgttccaccagcagcgcccggcaggccggggacagccgcagcagccgcagcttgttggccagagccgagggggacatgcccagctgggccgccaccgcctcctgggtcatgcccgtctggtggagaaaggcggcgatggcctccgcctcctccaggtaatgcagatccttgcgctgcaaattctccacaagggccagcagggcggaggcccgcccgtccacctccgcctccaggcaggggacggtctccagacccgccagcacggctgcccgcagccgccgctcccccgccaccagctcccagcccgccgcggtccgccgcaccgtcaggggctggaggataccgtggcggcggatggattccgccaactcccggagccccgtctcctcaaaggtccgccggggctgcatgggattggggcggatttccgccgccgggagccacagcaccttccgttccggcctgtccatgggaccacctccgtttcatttcctttattttacaggtcctgttccaaaaaggcagggggaatctgtcgaggcgtcccccactccgcaggaaaagcggccgcccaatgggcggccgccatgcgaacactgcatattccattaccgggacggttcctccgccaggcgcgcttcgtaggccgcctgatccgcccggccgggcctggtggcccgcagggccttcacgatcagggccgtggtggcctggaggaacaccggagaaaaggccaccggaaacagcacgtctccggggaaataggcctcggccagcaccgccccagcgctgatgttccgcatcccggcgttgagggcgacagtctgcactgtggggaagtccagcttcaacagccgccccgcccaataccccaggaaaaagcccaacaggcacaggaagaacaccacgatcatcacccgcaccagggtcggtgtcaggttccggaggaagggcgcgcagccggtggcattggccgtgatgatgagcagcagggccgccttggcgggcagggacagcttcggcttcagcgtgaccgccacggcaccctttgtcagctggtacagcaccatggctaccagagccggaagcgccaccatcagcagcaggtcccgcatcatgccccaggtgtccagctccaccaccgagcccaccagcagcttcatggtcagggggatcaccaccggggagaggagtgtatccagcagcaccaccgagaggcacagggcggtattgccccgactcatgcccacccacatgagggacgccacaccggtgggcactgcatactccagcaccagcccgatggtaaacagcggcgcgtccggaaagcacagcgtccccaggcccagggtaatgaggggcatcaccacgtggagcaggccgaaaatcaccgccaccggcagagggtggcggaccacctgcgccagctcccggaagccgccgcccaggctgttggaaaaagtcatgaaggcgaacagccctaccgtcaccccgttcaggtgggagagcacctccggaaaggcaatacccagcgccacacagcagagcaccaccggcgccatgtgtccgcccaggaagccatccaggcggccgagcgttttcaaatccgatcccctcttttctagttcctgttcagcggcagagataggaaaaccagccctcagcgctccgtgtctccaggatctcccagccgttttcccgcaggcggtccgccacctcctgcgcccggtcgtcgatgatgccggagcagaggaacagtccgcccggagccagcatgggccgcaccagcggagaaaggccgatgatgacgtccgccacgatattagccaccaccatctgccagccgccgcccagatccgcccgcagaaccgcgtcccccagtacatctccgatccggacggtgtaggtgtcctgcccgatgccgttgagggcggcgttctcataggctacgtcccggcacttgtcgtcgatatccaccgccgcggcggaggccgcccccagcttcagcgccgcgatggagaggataccgctgccgcagcccaggtccagtacccgctcgccgccgcggatggtcttctccagcgccgtcaggcacaggcgggtggtggcatgactgccggtgccgaaggtgaggcccggatccaacaccagggccacccgcccggcggcaaggcccgcccggaccttggggtcctcccgcagccactccggcaccaccagcagccggtctccaatctccatgggcttgtaatactgcttccagttgttctcccagtcggcgtcctccaggtcatccagggtcatcagcagggtgccgcagtcgtcccgggtctttttcagctcctccagggcgatgcggacctcccccagcttggcgaagccctcgtcccccgcctccagatagaaggtgatccgggaccggccctgcatctcctgccgcaaatcctcgtccacatagtcccagtactgcccgttgttctccaggaagtcctcgaactccgtctcgtcatcgatcaccacaccgtcgatgcccagggcggagagcatcgtctccaccggctccagtccggtgtggtttgtgtcgatatgtacctccagccatttcacagccgtcacctcatctctccgccggagcggaattatatttgatctccagggaaaagcgcccctctgaagggacgcttttccgtccgtcctcaccggcggctgcccaggaagaacagggccagcgtgccagggccagagtggttgccgatgaccggccccacgtagttgatatagatgtcctgtacgccgaagcggcgccgcacctcgtccgccacaaactcagcgtctgcctcgcagtccccgtggctgatgaagatggtctgccccgccgggtcgatggcgctctccgccatgcggtccaccagggccagcagggacgccttccgcccccgggtcttgctgacgggcaccagatggcccgtgtcatccacatgcagcaccggcttgatggacagcatggtgccgagcagggccgccgcagcgctgacccggccgccacgcttcagatggttcaggtcatccacggtgaaccagtggcacaccttcgccttggtctcctccgcaaagacgtggacctggtcgatggtcttccccttccgcttttcctggacgcagaggtataccagcagcccctggcccaaagaggcgctgagcgtgtccaccacaaagatcttccgtccggggtatgcctcccgcaggtcatcggcggcgatcaccgccgactggtaggtggtggagagcgcggaggaaaaggccaggtacagcacgtccctgccgctatccagaatcttccgcatagcctcatcaaacacgcccacgctgatggcggaggtggtcgccagggcgccggcgcggagccgggcatagaagtcctggaagccgatctcccggccgtccaggtagttgtggtacacccggtcctccatattcaggctcaggggcagcacctccagctccagatccgccgccatccgggcggtcatgtcgcagcagctgtctgtcaggatcacaaaatcatccatgctcagtccttctccttttcctttttggcccgttctttgcttttggcgtgggcggcgcttgctgcctcctcccgggcctcctgccgctggcgcagcagcgtcacataccggctgctggccacgccggcggcgtagctcatcagagcaaagtggatggccgcatccgccagctcctcctccccggtgcggtcctccatctcatcggccacggcgttcagcgccttgttgaggctcccgcagaaggcggcgtacccgtcggagatgggccggtccccctgcagctcctcccggatcagcagatccatatcccgggtggacatcacccgcttcaacacacagatagcggtgagataggccaggtggtcccggttgtatttcttcccctccgcccggggcaccaggccgctcttcgtgtagttgttcaccatggcggcggtgaggccgtcatcctcgtcgaaccggatcacctgccggtccatatagctgagcacctggtccatatatagggagaagtccggcagctggtcccagggcaccgggcgctgggtccgcagcctctcccgcagggccgtcagatcatacatgcggatacactccttccgccgtgcggcacggcttttattcagaggtagtataccacgcaaatctgattttgtaaatcacgttttccagggtccggtattgcattttctgttagcagttattttcccacacagaatcgggaaaaaatgcgggagacaatctcctccttcgccgtgcggcctgtcagctctcccagcgcgtccagggcctcctccgcgtctgtgagcaccgcatccggggtcattccggtctccagggcctccaaagcccggcggactgcgtccagggcccggcgggcggcgtcctcctgccgccggtcggtcagcaggctgcccgcctcccccgggtccccggcgggaaacagggctgctacggcgtttcccaggtcctccagtccctcgccagtgacggaggacagggacaccacggcggcaggcggggccagagggccctctccggcgggaaagaccgccccagccgtccgcagcccccccgccatatcccgcttagtgaacaccaggagccaaggaactccgcaccgggccacatccgccagcagagatccctcttccgggtcctccggcaccgcaccatccaccaccgccagcaccagctccgcggaggcgatggctctccggctccgctccacccccagctgttccaccgggtcctccgtggcccggatgccggcggtatcgatgagccgcagcaggaccccgccgcagagtacggactcctccaccgtgtcccgggtggtgccggggatgtcggtgacgatggcccgctcataccccgccagggcgttgagcagcgaagacttgcccgcgttgggccggcccacaatagccgtgcggacgccggatttcagtacctgtccccggcggcaggtgtccagcagccgctccagccgcccagcggcggaccggagggcagcggcgatctcctccggccgcacatcctgaatgtcctcgtccgggtagtccaccaccgcgtaaaaccgggaggtgacttccagcagctcctcctggaccggctccagcacccggcgcaggccgccgtccagctgggcggcggcgtttctggccgcggcggcggtctccgcgtcgatcaggtccaccaccgcctccgcctgggtcaggtccatccggccgttcaaaaacgcccgcttggtgaactcccccgcctgggcctgccgggccccggcagcgaagagggcagacagcagctcccgcagcaccacgggggagccgtggcagtggaactctgcgcagtcctccccggtgtagctgcccggccccgggaaccgcaccgcaaggccccggtcaatgacccggcccgcccggtccagcatctctccgaacaccattttccggggctcctgggcggcaaagggacggccgccagccgcccggaacacccgcccgcacagggcgaagcacccgtctcccgacacccggacgattccgatggcggtggcggcgcttccagtggcgattgccgcgatcacatccatctgcctcacgctcccttcccgccgggacggttctcctcgccccagatgcacatagcgtccaaaatggggatgagggaccgcccccgctccgaaaggctgtactccaccttgggcggaatctggggatactcctcccgctgcaccaggccggccgcctccagctccttcagggagagactcagcgtcttgtgggagatggtccccaggcgccgcttcagctcattgtaccgcagaacgctgtactccgccagccagtagagaataatcatcttgtacttaccgctcaccagggacatggtgtagccgaagcccgtctcttcaatcccggtgcccgccgtgatgcatggctccattttatgctctccttttggttagtatcttacaccgatgtgcgtactttacaaacagagaatatcataggatactggggacatcaagaaaaaaggagcgattctgatgtcaaagcagattctgattctcaacggcagcccccgcatccacggaaacactgcggcgctgatcgacgcgtttactgccggagcggaggcggcgggccacaccatcgcccggttcgatctggccgctctggacatccacggctgccggggctgcctgggcggcggaagggatccccggcacccctgtgtccagcgggacggcatggacgccgtgtatccggcctacatggccgcggatgtggtggtgctggcctcgcccatgtattactggagcatctccggacaactgaaatgcgcctttgaccggctgttcgcggtggcggaactgggccccgatctggcaaatccggtcaaggacgcggtgcttctgatggcggcggaaggcgacacggaggagaatttcgccccggtgcgggcctattacaaggcgctgctggactgcctgggctggaaggatgcgggcattgtatacgccggcggaaacatggccgtcggggatatccaggcccatccggagcagctggaggccgcccggcagctgggcgcggcgctgtaaccgccccgcagttgtcctgacgagaacgaggacgggcgctggggcctccttgtgttttcgggtacgcggtgatataatgcagccatcaaaaccaaatgccgttggaaatcatgatgccgcccgccggttctgctttcacgactgacagccgcgccgaacgagccgcaaagatacagaaaaggaggaatacagcatgaaagcgcacgtttttgcgctctgtctgtcgctgtccctgtgcctagggttgcccctgcccgcgttggcctttgccagccccttcactgatgtgcaggagacctccccctactatgatgccattttatgggccgcagaaaccggcgtcaccaacggcaccacagcgtccaccttctcccccgatgcgccctgtacccgggcccagctggccgtgttcctatggcgggcggccggcgagccgaaacccgcgctggcagaacagcagttcatggatgtgacggatcccagcgcctactactacggagccgtccagtgggctgcagagaaggatatgtggggattcgggacctttgcgccccatgcggtgtgtacccggctggacgcggtattcttcctgtggcgcgccgccggcagcccggatatggaaggagaatttccctttgccgacgtccccttcggggacggagacggacacggacagcccctctactggtacgctgaccaggcggtgttgtgggcggtggagaacggtgtcgccagcggtaccacggagaccacattctccccggacactccctgtacccggggtcagatcgccacattcctgtatcgggccgctcaggcagagacttccgcgaagtagggaacgatgaactgcaggcaacgaaaaaaaggcggcggctgccagaggcagccgccgtctttcgtccaaagcgtccgggtacatgatgcgcccggacgcttccagttgacagggaatggaacaggatggagacctcgttatttgatccgctcgccggcggcttccttggccttgatctccttcacagcatccttgtgagagaggttgacacggcccttctcgtcaatgtcggtgaccttcacccacatcatgtcgcccaccttgcaggcgtcctccaccttctcgatccggtggtccgccagcttggagatgtggaccagtccgtccttgccgggggccagctccacgaaggcgccaaaggtcatcagccgcaccacgcggccgtagtacagcgcgcccacctccgggacgaacacaatgtcatcaatgcacttcttggcggcgtcgcagctggcggcgtccacgccggcgatgaagatggagccgtcgtcgttgatgtcgatcttggcgccggtgtcggccacgatcttctggatgaccttgccgccggagccgatgacctcccggatcttggaggggtcgatgtgcatggtcagcatcttgggcgcgtacttgctgacctccttgcggggctcggagatggcgggcagcatgatctgatccaggatctcgcaccgggcgtcataggtgatgtccagggcctccttgatgatctccatggtgaggccgtcgttcttcaggtccatctggatggcggtgatgcccttcttggtaccgcccaccttgaagtccatctcgccgtggaaatcctccacgccctggatgtcgatgaaggtggtgaaggagccgtcgtcgtcctggatcaggccgcaggagatgccggccacaggggccttgatgggcacgccggcgtccatcagggccagggtggagccgcagatggagccctgggaggtggagccgttggagctcaacacctcagacaccacgcggatggcgtaggggaactcctccacagaggggagcacgggcaccagagcccgctccgccagagcaccgtggccgatctcccggcggccgggggaacgggcgggcttggcctcgcctacggagtagccggggaagttgtagtggtgcatataccgcttctccgtctcctcccagatggtgtccagcttctggttggcggagagggtgtccagggtgcagacggaaagcacctgggtctggccacgggtgaagaggccggagccgtgggtccggggcagcacgcccacctcggcggccaggggccggatctcgttcttctggcggccgtccacgcggtggccctccagaagccactgcttgacgatcttcttctggaacttgtaggtgaactcctccaggtactggtccatatccggatattcctccagatacttctcgtgccacttctcgatcatggcgttccagcgggcctcccggatgttcttgtcgtcggtgtccatggcggccttggcctcgtccatgaagtccgccacgatcttgtcgaacagctcctggttgaaatccgcgtgaggatactcaaacttgggcttgcccacctcggagaccatctgatcgatcagggcgatgatcttctggttctcctcatgggccatcttgatggcctcgaacatcttgtcgttggggacctcgttggcgccggcctcgatcatgaccacctttttgcgggtggagaccacggtgacgtccaggtcgctgaccttgcgctgctcgctgtcggggttgaacaccagcttgccgtccacaaggcccaccttcagggcgcccacggggccgttccaggggatgtcggagatggccagggcggcggaggtgccgatcagggcggcgatctctggcgtgcagtcgtggtccacgctcatgaccgtgcacatgacggacacgtcattgcggaagtcggaggggaacaggggccggatgggccggtcgatgacacggctggttaggatgcccttctcgccggggcggccctcccgccggttgaaggaaccggggatgcggcccacggagtacagcttctcctcaaaatctacgctcagggggaagaagtcgatgccgtcccgggggcggggcgccgcagtgacgcagcagagcacccgggtgtcgccgtagcccaccatgacggcggcgttggccagctccgccagcttgcccacctccatggtcagggggcggcccgccagctccatctcgtacttgtggtagttggggaattgtctcttggtgataatggttgacatgtctggtctcctttttcgtatgatctccgcgggagccaaaccatttagcacttgaagcaacggccggatccccggtccctccttcaactgctaaaagatcggcctgcccgcgggcgttgaaagaatgcgggaagagggtggtgcggcaaaggcgcaccaccctccacattgactcacttccggatgcccagcttggcgatgagggcacgatagcgctcgatgtccttcttctggaggtagtccagcagacggcggcgcttgccgaccatctgcagcaggccgcggttggaatgcttgtcctgggggttgttccgcatgtgctcggtcagcacgttgatccgctcggtgaggatggccacctggacctcgggagagccggtgtccccctcgtgggtgcggttggcgtcgatgatcgcggtcttctgttctttgcgcagcatgaaaatttccacctttcttcatatatacccgcagggctgcgccccgggatcggtgaaagtccacggagcgaagggctggggccgcacatacacgtgctgttgcatgataccacagaaattcccagttgtaaagataaaaatgtggagttttccccggatcggcggaaaattccccgtttttgtcccccgaatgggcttgacaaaccgcttcttctcatgataatctaaccgtactaatacggttaatacagttgcaggggctgcaccgcggccccgcggaagggaaggtgagcggatgatcagcctgaattatcgggactcccggcccatttacgagcagatccgggacggactgcggaagctgatcgtcaccggtgcgctgagcgcggacgaaaagctgccctcagtgcgggcgctggccgcccagctggccatcaatcccaataccatccagcgagcttataacgagctggagggcgagggatacatctactcggtccccggcaagggaagcttcgccgccgcgaacgcggcggcggactccgcccggcgggcggagctgctgacccaggtgcgggagctcctctccgagctgcggtatctaggggtaagccagcaggagctgctgaatctggtgaaggaggcgagtccgtcatgatcgaagtgaatggcctggtgaagcggttcgacggcttcgcagccctggacggcgccgcgctgtcggtgccggcgggcagcgtctacggcctggtgggtcccaacggcgccggtaagtccaccctgatccgccacctgacgggcatcttccgccaggacgcgggcacggtgcgcatcggcggcgaggatgtgtgggagaacgccgccctgaaggcgcggatcgccgccatccctgacgactggtactacttccttcagtcctccattcgggatatgatgcgcttttaccgcggattttatcccgctttttccatggagcggtatgaaaagctgaaggaggtctttcagctggatgaaaaacggcctatccgccgcctcagcaagggtatgcagaagcaggcggccttctggctggccctgtgctgcatgccggactacctgatcctggatgagccggtggacggtctggacccggtgatgcgccggcaggtgtggtctctggtgctggcggatgtggcccagcgaggcaccacggtgctggtttcttcccacaacctgcgggagctggaggacgtctgcgaccacgtgggcatcatggaccacggccgcgtgctgctggagcggtccctggcccagctgcaggacaacatggtaaagctgcaggtggtgttccccgacgggatgacggaggtgccgtcggacctgccggtgctccacgccagccaaatcggccgcatccataccttcatcatgcggatgagcgcccaggaggcagaggaccgtctggcggcgtacagtcccctgctggtggacgcagtgcccctgaccctggaggagatctttatttatgagctgggaggtgcggactatgcagtcaaagacatcgtactttaacgccacgctgttccgcaagaacctgacccggttctggccgctgtggggcctggcgtcctttatcggcgctctgttccctctggcggtgctgctggatatggtgcaccggggctggaacgtcctctccgcaccggacttcaccggtatgtactatgatgcggtgagcgccgtgcccgtcatcaatctggtctacgccgccctctgtgccatggcggtgtggagctatctatacaacgcccgcagcgtggggctgatgcacaccctgcctatccggcgggaagggctgttcctcaccaacttcctctccggcctctccatgaccctgattccctacgcggtcaccggggtcctgtgcgtcgtggtctccctgtgcggcggggcctttgacgccaaggggctggccgtcaccgtcctggcagtgctgggtgagagcttcttctacttctccagcgccaccttcgtggccttcatcaccggcaacgcctttaccatgccgccgctgtacgccctgctccacttcctggcggtgctgctggactggctgatctcctccttcgcccaagggttcatcttcggcttttccacttattacaccggggtggtggaatggctctcccccaccgtgtatctggtcaacaacgtccggtgcgcccggcagtatgtggaggtccagcagacgttccccgatggaacgccttacacctcccgccttttgacctccgcagacctggagagcttctggctgatcggcgtctacgccctggtaggactggcgctggctgccctggccctcatcctctaccgcaggcgccgcagtgagaccgccggcgacgtggtggccgtgggctggctgcggccggtgttccggtacggtgtggcagggctctgtgccctgctgggcggccagttcctctactccctgttctggtatggcttccagcagggggaatactacgacacgctgcccatggtggtctgcctgctggcggcaggggccatcgggtattacggcgcctccatgctgctggccaaggccttcaaggtgttccggggcagctggaagggcctgggcattgtgctggcgggctgtgccctggtctgctgtgtgctgcatttcgacctgctgggtgtggcggaccgggtgccggaggcctcccagatccagaccctggagatccggattgccgacaacacctacacgctcacgccggagaaggacgcggacctgctggagcaggtcagggccctccatcaaacggtggttgccgacgaatcctatgttcgggagatggaggcccgcagatcttccacctggtctgaggatgagacccccaacacggcatacaccggcctgaatctcacctatactctgaaaagcggcacccggatagaccgctggtactccctgctcattacccgggaccgactggcccagccagagacctatgattatctgctggaccagttcgtgaacagcgatactgtaaaagcccggcgcctccatctggatgacgatttctggacggtgagcggcggcagcctgtacattgacactcgtggcgagggctacgaactgggcagccgggagggtgacgccattctcaaggcagtgggccgggatctgaccgccgggaactggggggattacgactggttctccggcgacagcggcagcagctatgccatggacctggggctggactttgaaagtgcagacaaggagcgttacgactggatctctgtccatgtgacccctgccatgacggagacggtggactgcctggagcgcctcggcctggtgacgagggcagatctcgtcacctaccggcagctgtatccggaggactatggggcggacggctcctccatctggcaggaggttccgcacacgggtgagaatgcggtggtctacacggaggacaccacttccgccatggtctccccggcatgaggggggcaagaacgcggcggcgccggaatccccgttttgccgctttatgcctgctgctgatctttgccgctgtgggcgccgccgtctggctgtgggccggccggggccttccgggagagggcgtggaggtgccggactatgtgcaggcggacctcctcaccgtgaacccctggtcccggcccggcacgcccctggagaagatcgatgggattgtgatccactacgtgggcaaccccggcaccacggcgaaggccaaccggaactactttgaatccctgtcctctggggagacggagacatacgcctccagccacttcatcgtggggctggagggtgaggtcatccagtgcattcccctgacggagatcgcctacgcctccaatatccgcaacgaggacaccgtggccatcgaggtctgccacccggacgagaccggggcattctccccggccgcctaccagcaggtggtggagctgacggcctggctgtgccggaccttcgatctggatccggacactgatgtgatccgccactacgacgtgacggagaagctgtgtcccctctattatgtggagcatccggatgcctgggatgccttccgggcagacgttgcagcagagatggagcgccagaccgaagtctcctgacacggagcttcaaaaattttttggtcctccgtgaaacaaaacggcattcttgatcgtcttataaagcagagggagattttacatcaaagggggcctttttccatggagcaaaatccggctgccgccacgctctggcgcatgtgggtggataccaagcggcgcattgtctccttccacgaggagaaggactgccagctgctggagttccgcagccacgagatgtttttgagctgcgtggaccaatacgcctgcaagcaataccgttatcaatgaccctgcggggccttttcgtccatatcccggcggcttcagccgcctaaggaggctttttgatccatgtggcaaaaacgcgggccagcactgctgtgtctcctgctggccaccgcactgacggtctttgccgccgcccgctcccccgccgctccgcccggcgaagtccctcctccgcagacgctggaggaggaatccctgctctatgaagagacgccggtccagattatctccctgttggacctggagccggtggatacccgggcgtctgccaatcccgtccgggtggggggcggcaccctggaccctgtggaccaggcggagatggcatccgttctggcggaatgtacattaaaagacaacaccatcgtcaggctctacgttacagcggagggcctgatcgatggcgcttttttgcgccctggcgccgggtggatccgatttgcccgcctgtaccgcggcgcggaccagggccccaattacgcggaaaccgccgcccttaccgcctgctccggtattctggggcacgatggctttctgctgcggaccgacgggcactgctccggcgtttactcctatgattactactggttcgacactgccggggacttgcaggtcctcaccgccaggatggacccggtggccctggacctggacggggacggaacggcggaactggtctgggagatcgccgagtggcagggcgcgttttccttttacttccggcggacagacggcgccatctgttgtgtgacgccgtccgaatacatcgacgcatcgggcctgttcctggctgcggtggagcaggaggggcccggcccggtccggctgatctaccgctatcacggcacggacgaggatcaggaacagttctgcgccgtgacgtttcgggacggtgccctggagattgagatggaccttgtctatgtcccggcctcgctggaagacacagtccccctttcagatcccacagctggcggggccgccctgccccatgtgtccattaccggccccgacggctggaccatggacggtgccggggaggcggcctatctggatctctggtcccttctctggaacagcccatatccctcctcgaagggggcggtgatcgtccccaccgatgcgccgctggatgcggagaccacctataccgtcaccttctccgatccgcaggccgggaactccttttcctggtccctggacgccgagggcatctgccgcctggacggcatagagggcaactgccggatggtgtccaccggtgtcggctccctgcccgcatactgtcacgatgtgctggagctctactgccgggccagccgcaccgcccggaactatgacgcgcagggccgatggctgggatgggatttggtcccggatacggtcgccccgggctaaaacgggtatcttttgcaaaaaccgccttgacaaacggcgaaaatgtgatacgatagtccggtaaatggaacattccggcgtggaaaaggacgagtaaccggcatccctcctgcaaagagagccgccgtttggtgcaaggcggacgggagctgcggcgaaaatcaccttggagcctcctgctgaaagacgacgcgagtaagcgtggacgattgatgcccgttacagcatcggcccgtggcagcgggctgtgaggggctgtttcccgcaagggcgcagcagcgagagtggtaccgcagagtgtttgcaaacgctttgtctcttgaaaaagaggcaaggcgtttttgttttctgaagggatgtgtattctggtgaaatgcccaaactgcggaaaggaaatggaagagggaactctgcacacccggaattaccctttctggacgcagcaggagctccgattctttcgggcccccacagacaccgtggagctgggccccattggcgatgacaccaccagcgtgtttacacgggatccgttcccggaatttccccatgccatgctctgccgggaatgcggccttgtcaccttcccgtgcagcttgattgaaacctccaaaaaagatagcaaataggagctggaacaggaggagctttatgaagtgtccgtattgtcagcagcaaatgcaggagggctttctcagcagccgctcccccgttttctggtcagaggaggtgtcaggccttccccttcccgccaggaagggagatttgcttctgggtggaaagctggggctggttgtccgcccccgggcttacctctgccggagctgtaaaaccgtcattacccaatatcaataaaaattcagcaaacagaatggaaataggaggaaagatatggactacaacaagaccatcaatctgcccaagaccgacttccccatgcgggcgggcctgcccaagcgggagccggagatgctcaagcgctggcaggagcaggacgtgtacaacgagctgctgaagaagaacgagggcaagcccctcttcaatctccacgacggcccgcccttttccaacggcggcatccacatgggcaccgccatgaacaaggccctcaaggatatcatcacccgatcctacgccatgcggggctactacaccccctatatccccggctgggacaaccacggtatgcccatcgagtccgccattatcaagcagaacaagctgaaccacaaggctatgagcattccggacttccgctccgcctgccatgactttgcccagcattatgtgggcgtgcagatggacgccttcaagcgcatgggcgtcatcggcgactgggagcacccctacctcaccatgaaccccggctttgaggctgaggaggtgaaggtgttcggtgccatgtacaagaagggctatatctacaaggatttcaagcccgtctactggtgcccccacgacgagaccgccctggcggaggcggagatcgagtatcaggacgacccttgcaccactgtgtatgtgaagttccccatgcacgacgattgcggaaagctttccggttatgacaagctgttcttcgtgatctggaccaccaccatctggaccctgccgggcaacctggccatcgccctgcatcccgacgagtcctacgctgtggtgaaggcccccaacggcgaggcctatatcatggccgaggctttggtggagaaggtcatgcacttgggcggcttcgacacctgggaggtggcggagacccatcccggcgccttctttgagaacatgctggcggaccaccccttcctgcccaagacctcccgcctgctgctggcggattacgtcaccatggactccggcaccggctgcgtccacacggcccccggcttcggcgcggatgactacgagacctgcaagcgctacggcgtggagatggtagttcccgtggacgaccagggccgccacacggagtacgccggcaagtacgccggtatgaagaccgatgagtccaaccccgtcatcctggcggacatgaaggagagcggcatgctcttcgccagcgaggacatcatccacagctatccccactgctggcgctgcaagggccccatcatcttccgggccacgccccagtggttctgctccgtggagtccttcaaggaacaggccgtcgccgcgtgcgacgatgtgcgctgggtgcccggctggggcattgaccggatgaagtccatgatccgagagcgcaacgattggtgcatctcccgccagcgcaagtggggcctgcccattcccgtgttctactgcaaggactgcggcaagcccatctgcaccgatgagaccatcgacgccatctccaagctcttcgccgccgaaggctccaacgcctggttcgccaaggaggcggaggagatcctgccggagggcttcgcctgcccccactgcggtgccaaagccggcttcaccaaggagaccgataccctggacggctggttcgactccggttcctcccacttcgccgccatgaagaaggaccagggcttctggcccgccaccatgtatctggagggcctggaccagtaccgcggctggttccagtcggcgctgctgaccgccgtgggcgccttcggccagggcgcgcccttcaaggagtgcgtcacccacggctggaccgtggacggcgagggcagagccatgcacaagtccctgggcaatggcatggacccggcagagatcatcaaccagtatggcgcggacctgctgcgcctgtgggccgccagcgccgactaccacgccgacgtccgctgctctcacgagatcttcaagcagctcagccagaactacctcaagttccgcaacaccgcccggtactgcctgggcaatctggacggctttgacgccgaccagctgacggcgcccgcggagatggaggaactggaccgctgggccgtcacccgcctgaacgccctgatggagaagtgcgccaaggcgtacaacgactatgagttcctggtggtcacccacgcggtgaacgacttctgcgtggtggacatgtccaacttctatctggacatcatcaaggaccgtctgtactgcgaggaaaaggacggcgccaagcgccgcagcgcccagaccgccctgttcctgattctggacaccatgaccaagctgatggcccccatcctgtgcttcacctgcgatgagatctggctctctatgccccaccgcagcggcgacgatggtcggaacgtggtgttcaacgacatgaacaagcccttcaccgactacgccctggatgagaccgccatggagaagtggtccgccgtggaaaagctgcgcgacgacgtgaacgccgtgctggaggccgcccgggccgagaagaaaatcggcaaggccctggaggcccacgtggccctccacgctggggacgacgcggcgtctgccgccctggtgcaggtgatgggcctgaacctggcagagctcttcatcgtctccgactgccaggtctccagtgcggagcccgatgccgcctccactgtgggccagggtgccaacttccccggcctcaccgtggaagtcagcgaggccagaggcgacaagtgcgagcggtgctggatgcacagccccactgtgggcgccgacgcggatcaccccaccctctgcgcccgctgcgccgccgtggtgcggaaactcccccagttctgaccatccgaaaacagcagtcaaaaaggtcccggccattggccgggacctttttccatgtcgattcaattcccccgggcacgttcctttttcagcttccggatatcctctcccgcaaagggcagcagggtatattccccttcaatccgggaggcgatctggggcgtgtaccgccgggccagctctcccggcgtcaggtttgtgctgatgatggtggagcggcgctccatctggcgggtgttgacaatctggtacagggcgctctgaacgaaggatgtggtcatctcggatcccagatcgtccagaatcagcagatcgcagttcagcacccgctccacgtggtcgtcggcctcctcttcccgggtgaacttctgctgctcgaattgtgcaaagatgtggcccgcggtgtcataaaccaccgaatgccccttctcgctgacctcccgggcaatggcggcggagaggtgggtctttcccagtccgggtgcgccgaagagcaggaggttcgccgggcgcttgccgaactggtgggcaaaatccgcgcagatgtcgtagatcatctccatgtgctgccggacggtgatgccgatgttcgggtcatagcggtccgggtaccagtctgtggagaaggtgtcaaagctctggtgccccaggtccagcatccgggacagctccttctgctgctcccgggcgtaatagccccgcaggcagcggcacacccggccgttgcggtagcccgtgtccccgcagagggcgcaggcgggcgtctcctccagagcatcctccggcaggcccatcttctgcagaagctcccgcttctctgcctggaggctcagattttcatcccgcagcactgccaccgcggaccgggggtccgtgccgtggcggagcgcactggtgatgatgcggctcatggtggagcgaagctccccgtcgatctcccgcaggcggggctggcgggcaaaaatccgttcccgccgctcctgatactgggcctgccgcctctggcggtcctcctcgaaccgctggagggccaagcgcatcacctttccgtcatacgccaccgctcatcacctcctgttccgatgcagctcctgcatatatctgcgcatctccgtctccgtgtccctgggggactgctggtcccccctgcgggccgccgggcggtcccccgcctgaatctcctccaccgtgtggaggcccgcctcgttccacttcttcaaaatgccgttgcaataggcccacttcagctcatggcacttcagcaccgttttgtcataggccagggccacggcctccgggccaaagcccatctcctgccaggcgaggatgtacttctcctccgaaggcgcgggggccggtcccccagctgcagcgccttcatatactggggcaggaccccctggcgctgggcataggtccggagataggcatccgccgccgcctgggtgtcgatccccatgcgggcccaggcgtagccctccttttcgatctgcttcatgccggggcggcggccctcgccgaatcggcgctgcacccgctctacacagtggcacaccagcagatagaccacgccttccggcaggcccagatagtccgtcagtcccagcaggatccccacgtccggggtggtcagctttttgcccagcttcacctccacctgccgggtgagggcctggaacgccttgctgtgctccagccgctccgccacgtcggcgcgctgatagacgggccgctcctccgccggggcgggcggcgtctccgcgggggccaccaggcccagctcccgcagggcggtctccgccgcctcgatgcggccgcggtcccaccgcagctccccggccagggaccggggcggtaccgtgccctgccgccgcagcagcgccagatacagcagcgccgcatccccgtcgccccggtccagcagccgcttcaccgtggccgcggacagggtgacgctctcatccccggtatgtaccagacagctgggcatcctccgctcctcccctctttttgaacttcccctattctacacgattttccccggcaggacaagccccggcggaaaaagtccgcacctgccccagcttctggcggaaatgtgaatttttttaaaacctcccgtttttctgtggcgctgtcttttttcctatgatatactataatttatgataatgggcggcatctgccctgccgctgatcaatctaccgacgagggggaagttgtttatggcaaatcgcgtggtcatcaacatctgcggggaggagctcaccttcattgcggaggagtcctcttcttacatgcagcgggtgggcgcctacgtcaatgataaaatggcggaggtcctggacagctccaaagtgggccgcacggatgccgccgtcctcaccgccgtcaacattgccgacgagctcttcaaggcccaggccgcggcggagcagctccggggccagatcaaggggtatctggacgaggccggcagggcccagagcgaggccagcgagctgaagcgggaggtcttccgcctccagcagaagctggacgcccaggcccggaaggaccggggatgaggccggagctgctggcccccgccggttcgccggaggctctgcgggcggcggtccagaacggcgcggacgcggtgtacctgggctggggcgccttcaacgcccgtaggggcgcgaaaaatttttctgatgaggagttcgccgccgccctggcctactgccacgagcggggggtccgggtctttctgacgctgaacaccctggtgacggaccgggagctgccccaggcgctggagacagccgttcaggccggccgcctgggggtggacgcggtgctggtgcaggactgggggctgttcggcctgctgcgccggacgctgccggatctgcccctccacgccagcacccagatgagcctgttcacctccggcggtgcccgggagatcgccgccgacggctgcgagcgggtggtcattgcccgggagtgttcggcggaggacacccgtacgatctgtgaaaactgccctgtggaagtggaggtctttgcccacggggcgctgtgcatgtgctactccggccagtgcgggatgagcgccctgatcgggggccgctccggaaaccggggccgctgcgcccagccctgccgcctgccctacggggttaacgcccccgccaaaaaggcatatcccctgagcctgaaagacagctgtctggccggacggctggaggagatgggggccatgggcgtatcctgcgtgaagctggagggccgcatgaagcggccggagtatgtggccgtcatcacccgcatctacgcccgcctgctggaggagggccgtggtcccaccgccgacgagcgggcggagctggagcaggccttctcccggtccggcttcaccgactggtactggcagggcaaacacggcgctgccatgttcgggacccgtccggagaacgctccggaccccaaggacctctttgaggaggcccgccgggcctatgaacgggacagcctgcggacggtgccggtggatctctcctgctccgtttccgcgggggtgccctgcaccctgactgtgtcggaccgggacggccacagcgtcacggtcaccggcccggtgccggaggccgcccggacccgggccctggatggactggagctggaagcccgcctccgcaagaccggcggcaccgcctaccgctgcgacaccgtggtcaccctggtagatgaggggctgtccctctccgccagtgccgtcaatgccctgcggcgggatgcgctggcggctctcaccgccgcccgcactgcgccgcccaagcgccgggagctgccggtgccgcccctgccggaggccgactgcacagcggaggcgccccggctcaccatttccgtgacccggctggagcagctctcccccgccctgctggagctgggctgcccggcccgggtctatatcccgctggaagaggtctcccggctggaatctctcccgggagaaggcccggagtggtgcgccgttctgccccgggtctggcgggaccgggacgagcctgcgctccgcaccttgctggagcgggcccgggctctgggctttaccggtgttctgatcggaaatctgggccatctgcccctggtgcggggcctggacttccatctctacggcgattacggcctgaatgtgttcaattcccggtccctggcctatctgaaggacaaggagctggagagcgcctgcgtgtcctttgagctgcggttcgcccagatccgggatctgaaaaaggtgctgcgggcggaggccattgtctacggccgcctgcccctgatgattacggagaactgcctggtgcagaacgagaccggctgccgcctggaccggcagggcctttgtgtcccggaggacggcccctgccgctgcggccagcccaatgttctggtcgaccgcaccggcgccgcttttcccctgctacccgcctacggccaccggacggaaatccagaacagcaagccgctgtatctggcggaccggccggagcaccgcaggctgggactggcctatgcccgtctccgcttcaccacggagacagcggaggagtgcgtgtccgtcgtgcaaaactatctggatgccgcgcccgccgcgggggatttcacccgggggctttacgaacggggagttgaataatcaaatggcagcctgtatagatacccgctggttttggacccttttgatccttaccctctgcggagagtttctgcttccctgcctgctggcccggaaggatccagcctatcggcctggaaccatggcggtcagcgttctgggcagaaggggcggtcccgtggcccgtgtctaccgcctgtggctggcgtggctggggatatggcttttgaccactgccgccgtctacgccgtcggcgcggcgccggcctcccggtggctggcggcgggattggccgtgtccctgggcggcttcgccctgggcgccggtatcctggctgccctgtttcccaccgggctcaccaaagatctgtcggatcgctctgccctgatccacggcattgcctctgccctgggctttttcgccctgctgttcctacccctctggcgggcgctgctggcgctggagacagactccccggttatggcgtgggcctgctttgccgccctggggctggcgctggtattcttcacgctgtttgtcctctcggacaaagaccgcttccagggcacggctgtggcccgtgagggtctttgggaacagctctgcctggcggccatgtatgttcccttgttgctggatgcaatcgtccacctgatttccgccccctgagctgtacagccctccgcacggaaccttacactgataaaagcagggatgcatctgtccgcccatcagcgggacttgtctcctgcatccaatggggttaaccgcctgaaagcatcatatttcctatacaattcataaattttattctatattatacaaaccgtatttattttggagtttgacatggaagagatcaaggtaaaatatttcacagatgacatcgacgagctgtgctacgtggagggcaagtccgactggatcgacctacatgcggcggaaaccgtgactatgaaggccggggagttccggctgatccccttgggggtggccatcgccctgccggaggggtatgaagcccacatcgtcccccgcagctccacctttaagaattacggcattctgcagaccaactccatgggcgtggtagactacacctaccggggcgacggtgaccagtggcggatgcccgcctacgccacccgggatgtgaccattgagaaaaacgcccggatctgccagttccgcatcatgaaaaaccagccccggctgaccttcaccaaagtggagcatctggacggccccgaccggggcggcttcggctccaccggaaagtgagggcgcggccatggcaaagatcgtactggcctccggctctccccggcggcaggagctgctccagcgcatcggcatcacggacttcgacatccgggtcccccggacggaggaaacctatcccgccggcctctccccccgggagacggtggagtacatctcccgggagaagtccgacgcggccgccgctctctgcacaccggaggaaatcatcatcactgccgacaccatggtgtttctggacgaccagcgtctcggcaagcctgtggacgaggcggacgccctgcggatgctgacggccctccagggccgccgccacacggtatgcaccggcgtcaccgtccgccggggcggcgagatcctgacggagagcgcgtccaccgacgtgtatttccgccctgccgcggaggcggagctctggggctacatccgcaccggcgagcccatggacaaggccggggcctacggcgtccaggggctgggtgcccttctggtggagcggctggacggtgactttttcaacgtgatgggtctgccggtcctgcgcttgagccggatgctggagcggttcggcgtccatttcttctgctgaccaacgatcaggagggtttcctttgaagaaattttttcgggaacacggcatctgggtcctgttcgccacggcggtgatcgccgtgagcctgtccctcatgtcctttttctccaacacctcctctcccctgtccaatctggcggggatcatcgcctcccccttccggtcggcctacaccgctgtaacaggctggatcacagacaagcagaactactatcaggacgtcaccgccctggaggaggagaacgccgccctgcggcgggaaaacgccatcctcaaggcccagaaccgcctggctcagaccaacaatgaggaaaacgcccgcctgcgggatctgctgaacctgcggccccagaactatgacctggagctggagacggcctccgtcacggagcgcacggtcaccaactggacctcctccctgacactgaacatcggcacggatcacggtgtcgaagtgaacgactgcgtcatcgacgagacgtatgccctggtgggtgtggtcagcgaagtgggactcaactggtgcacggtcctcaccatcgtggacacggacacctccctgggcgcccaggtgttccgcaccaaggacctggggctggcggtgggcgacttctccctgatgcgggagaaccgcctgcggctggactatctgcccgcggactgtcagctgctgggcggcgatctggtggtcacctccggcctgggcgggtattatccctccggcctctctgtcggcacagtggaggaggtgcagctcagcgactccggcgccgcctcctacgcggtgctggaacccgccgccgactttgacagtctggtggaggtcttcgtcatcaaatcctttgacatccagacctgatgggacggatgtccccacctgttcggaaaggaggctccggcattgctggcgcggaatgagaccattttcaaatgggccctgtatgccggggccacggcagtgttcttcctgctccagggggcggtgctccagcggatcaccctctggggcgtcattccctttgtgttccccatcctggtggcggtcctgggtatgtatgagggtcccctccccgcctccgtctacgccctgacggtgggagtgctgtgcgacctgctgctgccggcgtccatcccctgcttttacaccctgatctttcccgcggcggggctatgcgcggcgctgatctcccagagcctgctgccggcaggctttctctgtggggtggtcacctccgtgctctccttcctccttacagacgcctttcactgtatcgtgctgtgggctggggggaaagccgcctgggctgcgggggcccaagtcttcctgcgggaggtctgcgtctccatcctgctggtggtcccggtggtgctgctgttctctgccgtgttccgccgcacccacctggacgactgagaaggaggctgtctatggaccataaggaagcccatcatctgcgcctgtatgttctggcagccctgtttttcattgtggctgcggtctacatcggggtcctgtacgatacgcaggtgaacaattacgactattactacgccagctccgtccgcagcatcgcccggtcggagaccgtggaggccgcccggggcaacatcaccgaccgaaacggcaaggtgctggtgtccagccgctcctcctacaacctgacctttgacgcctccctgctggagaaggacgaagatgccaacgagtccctcctgcggctgctgcagttgtgtcagagccgggggatcaactgggtggattctctgcccatctcccgctccgcccccttcgcctacaccatcgactccctggacagcgccgccaggagccgctttctcacctatctgaaggatctggacgaggccgcgaacgccctggccgcctatctgctggagcatcctgccctgctggagaccacggacgaggagggcaacagggaaaaccccgccgacgacatcctggcggatgaggagctggatcaggccagcaaggcccaggccctgctggaggagctgacctccagtcagctgaccggcgccatgctggaagggtccggtctctccgccacgcggctgatcgccctgatgcggaaggatttcggcctctccgcctctttttccgtggaggaggcccggctggtgctgggcgtccagtacgagatccgcagccgaaatctcgccaggacggacccctatgtgctggcggaggacatcgacgcggagctgatctccctgctgaacgacggcgactacgccggagccaagatcaccccctcctccgtgcgggagtacgagacgacctacggggcgcatatcctggggtatctcggaaaaatcaacgacagtgcggaaaaggaggccctgggcgagggatataactggaacgactatgtgggcaaggacggcgtggaggcggcctttgaatcccatctcaagggcaccgacggcacccgggtggtctccctgaacgaggacggcaagatcaccggcgagtattactccaaggagccggtgcccggcaacaccgtggagctgaccatcgacctggacctccagcaggcggcggaggacgccctggccgccaccatcacccggatgaccggggaggatggggatgagacccggggcggcgccgtggcggtggtacaggtgggcacgggggaagttctggccctggcctcttatcccacctatgatctctccacattccgacagagcagcatctacgcggctctctacaatgaccctgcccgccccttcacaaaccgcgccaccaacgggacgtacgtccccggctccaccatcaagcccctgacggccgtggccgcgctggagaaggggatcattactcccacccaggagatctactctcccagccggtgggtctatcccaacgaccccacccacagcggcgccaactgcgccggcggcaaccacggtctcatcaatgtgacggaggccatcaccaagtcctgcaactacttcttcgcggagatgggataccgaatgggcatggacaccttccgggagtatctgcaggccttcggcctgggagagcacaccggcattgagattggtgattacgccggtaccttgcccagcaatgaggcgggccacgaccagaccccctgggccaccttcggccaggccaaccagctctactcacccctccagcttgccaactacatcgccacactggcctccggcggacagcactgcaaggcccacctgctgaaggccgtgaaatcctatgacaatacggaggtcctggctgtgggcgacacggcgcccaccaacgtggtctccatgcaggattccacgctagaggcggtgaaaaagggcatgctgggctacacccagcccggcggctctgtttacaatgccttccggaactgcgtggtcactgccggcgccaagaccggcacctccgagctgggcggcaaccagaccgaaaacggcgtcttcgtctgcttcgccccttatgacgatccggagatcgccgtggccatcgtcattgagcacgccacctggggctccaatctggccaccacgggcgtggatattctcaacgcttactttaccgccgacgagaccggcagtgccgtcaccggcgaaaaccaactgcttccgtaaggagacgcatccccatgagcgaaccctttgtctttgatccccgctgcgacctgtgcaaggagcccttcggcgccgtcccctgcggaacggcggtcacctttcactgccgccccctggccacggagggcttttcccactgcgcactggtcctctcctgtgagttttccgggacgcagcgggagcaggaactacccctggagggcttcgcaggcgagcggctttgcttttccggcacactgaccgcgccggagctgcccgatcttctctggtatcacttccgcttctggcgggaggacggcaccggctgtctgctggacaagaccggctaccgcagtgacggacaggccgtgtcctggcagctgacggtctaccaggaaagccgtacgcccggctggtttggggcaggtgtgacataccaaatttttccagatcgtttctgccgtctggtacccgtggaccctgcgggtctggttggccggcgctgggtccacgaggactgggatgacacgccggagtggcggccggatccggatggggagatccgcaaccgggacttctttggtggcactctggcggggatcacgtcgaaactggacgatttgaaggcccttggtgtcaccacgctgtacctctgccccattttcgagtccgcctccaaccaccgttataacacagcggactatacccgcatcgaccccatgctgggcacggaggccgatttccgcgctctctgcgcccaggcccgacagcgggggatgcgggtgattttggacggcgtgttcaaccacaccggatcccagagcatgtacttcaatgccgatggctattaccccactttgggcgcagcccagagccaggattctccctggtacagctggtaccggttccaccactggccggattcctacgactcttggtggggcatccgcactctgccagcggtggaggagtcctctccctcttatgtggatttcatcattgacggcaaggactccattatccgccggtggctgcgtgccggagcttccggctggcgactggatgtggcggatgagctgccggactggtttctggagaagatccgcgccgccatggaggagacggcccctgacagcgtcctgatcggcgaggtgtgggaggacggctccaataagatcgcctactcccagcggcggcggtatctgctgggcagtgagacccacgggctgatgaactaccccttccgcacggcgctgctggcctatgtctccggcggggatgccgatgactttcgggaggccatggagaccctgcgggagaactatcctccggcggccttttactccgccatgaactttttgggcacccacgataccccccgcatcctgacgctgctgggtgcggaccgaacgccggacaccaaggcggagcgggcctcctaccggcttttgccccgggagcgggcagcgggcatcgccaagctgcggctggcggcgctggtgctgttcaccttccccggctctcccatgatctattacggggatgaggccgggatggagggctttgaggaccctctgaatcggggaacctacccctggggccgggaagaccgggacctgctggcgtggttcacccggctgggtgccctgcggaatgcgtatccagccctgcagtccggcaccatctcctggctctacaccgcaggtcctttgttgatttttgcccggcagaacggtgaccagcggctgaccacagccgtcaacgcctcaccggactcccacactgtcacactgctgtgggaaggcgctggccccactgatctcctcaccggagatactcttccctgttccggcggtgttctgcacttgcagctgccgccctggggctgccgtcttttgctgtgaccggctgcggatgtttcacgtgaaacatccgcggctctttttctgccgtttgtttcacgtgaaacattttctcttccttttctctgcttttccgcttttctccttgcaacggccgtccacgcttgctataataaatgagcataagcatttctaccttattgggtattttcagaaagtaggtgcccacgtggcaaaaaccattgcgattgtgaatcaaaaaggcggcgtggggaaaacaaccacctgtgtgaatctcgccgcggccttgacggaggccgggcagcgcatcctcctgtgtgattttgatcctcaggccaattccacttctggaatgggcgtggacaagacggtctccaagggaatctacgatgccctgatcggcgaagtgccggtggaggacgccctggtgcacaccaaatacggcgatgttctcccctccaacaaggcgctggccggcgccgggatcgaactgatcggcatggagcgccgggaattccttctgcgggacgcgctggacaaggtaaaagatcgctacgacttcctgttcatcgactgccccccctctctggaactgctgacgctgaacgccctctgcgccgcggacgccatcctggtgccggtgcagggcgaatactacgctctggagggcctcagtgacctgatgaacacggtgcggatcgtccgcaggtccctgaatccccggctggaactggacggcgtgctgctgaccatgtttgacgggcggaccaatttggccttgcaggtggcggaggaagtgaagcactacttccccggcaaggtctatgccactgtgatcccccggaacgtgcgcctcagcgaggcgcccagccacggcaagcccatcaccgcctatgatcggacctcccggggcgcggaggcctacaccgcctttgcggcggagtttctgaaaaagcaaagcgcctgattctctggaaaggagcgttcccatggcatccaagaaaccctccggcctcggccggggtctcggcgccctgctgggcgacgacgtattgaaggcggagagcaccggcagcctgtacctgcccatttcccaggtggaaagctgttcctcccagccccgcaagcactttgacgaggcatccctggcagaactggccgactccatccgagagcacggtatcatccagcctcttaccgtccggaagctggcctccggctactatcagatcatcgccggagaacggcgctggcgggctgcgcggctggcgggccttcaggaagtgcccgtcattgtcatggaggccgatgaccgcaaggccgccgagctggccatgatcgaaaacctccagcgggaggatctgaaccccatagaggaagccgctggcttccagtccctgatggaaacgtatcacatgacccaggaggaggccgcgtcccgagtgggcaaatcccgcagcgccgtggccaacgcgctgcggctgctgtccctgacgccgccggtggccaagctggtggaggagggaaagctctccgccggtcacgctcgggcgctgctgcccctctcccccgccctgcaggaaaacgccgctggcgccgtgatctccggcggcctctctgtccgccagacggaggccctggccaagcggctgagtctggaaaagccggaaaaagcccccgcgccgaagggaatcgactatgccgcggaggcgcagaaggagttgagctccaagctgggccggggggtgcggatcgtcaccggccgcaaaaagggccggattgagctggaatactacggcattgacgacctcaacgacctgctggaggccctggcgatgctccgggcaaagcaaacgaaaaccccctgattgggaaaggatgatctgccatgaaatttgaaaaacgcagcggagacgaagcggagacaccctcctctgctccggaggaaacgccctccaccgggaaaaagcccgttgtcatctatatcatgatcctgttcatcgtggcctttctgctgatggcgctgtcctttctaatgcaccagcggagcaactccgaggtgattggggagcttcaggactccgtcactgccatgcaggaggtacaggccacgcaggacgccctgctggacctgcaaaaccagctggatgaagcccagaccaccatcgacgcgctggagtcctccgcagaggaaactgacgccgccttggcggaggcccagcgggagaaccaggcactgctggctctgtacaccattcagcagcagtattctgcgggagatctggcgggctgtcaagccagcatcgacgccttcgaggcgtctgaataccgggacgcactgcctgagactgctgaggagggtgtcacccctccctcccagcggtatgcgcagctgaaggaagcagcagaggcccgttgagcagtcaacggctggccattgtttcacgtgaaacatgcaacatcaataaattgaggagagaatcatcatgctggatatcaaatttatccgggagaatccggatgccgtccgtgaaaatatcaaaaagaagtttcaggatgccaagcttcccctggtagacgaagtcctggacctggactccaagcgccgggccgccattgcggaggcggatcagctccgctccaaccgaaacacactcagcaagcagatcggcatgctgatgggccaggccaaaaaggaccccgccaagctggcggaggccgaggctgtcaagcagcaggtgaaggaacaggcggaccgcttggcagagctggagaaacaggagacggagctggaggaaaagctccatcacaatatgctgctgatcccccagatgatcgattcctccgtgcccatcggcaaggatgacagcgaaaatgtagaggtccagcggttcggagcatgtgaagtccccgacttccccattccctaccacgtggatatcatggagtccttcaacggcatcgacctggatgccgccgggcgggtctccggcagcggcttttactacctgctgggcgacattgcccggctccatgaggcggtgctggcctacggccgggacttcatgatcgacaagggcttcacctactgcatcccccccttcatgatccacggcaacgtggtggagggcgttatgagccagacagacatggacggcatgatgtacaagatcgaaggggaggacctgtacctgatcggcaccagcgagcactccatgatcggccggttcattgaccagatcctgccggctgagagcctgccccagacccttacctcctactccccctgtttccgcaaggagaaaggtgcccacggcatcgaggagcgtggcatctaccgcatccaccagtttgaaaagcaggagatgatcgtagtctgtaagcccgaggagtccaaggactggtatgagaagctgtggcggatgtccgtggagctgttccgctctctggatattccggtgcggcagctggagtgctgctccggcgacctggcagatctaaaggtcaagtcctgcgatatcgaggcctggtctccccgccagcagaagttctttgaggtgtgctcctgctccaatctgggggacgcccaggcccgccgtctgcgcatccgctataaggatgaaaatggcaaaatgcagctgtgccacaccctgaataacacctgcgtggccccgccccggatgctgatcgccttcctggagaacaacctccaggccgacggcactgtccgcatcccccaggtcctgcggccctatatgggcggcaaggaattgctggtccccgcggaaaaatccaatttgtaattttttgttttatttatacaaatcgttgaacccgtttccagccgttggagcggcgcgcagccctgctccggatcattcggtgcccctccagcggctccattcgggtcaaatctctgaaagccttgggctccaatggttacagcatacgtacacaggcgcccattcatttcacacaggagagtcccatgactgaacttaccaaaaagaccaccggcttcctggcggagtttcgccaattcattgccagaggaaatgtgctggatatggcggtgggcgtcatcatcggcggcgccttcggcaaaatttccacctccctggtcaacgatatcctgatgcccctgctctccctgctcaccggcggcgcggacttctcccaatggcaatgggtcctgcgggaggcggtgtatgacgccggcggcagcgaagtgcgcgccgctgttgccatcaattacggctcttttctctccactattctggacttcctcatcatcgcctttgcggtcttctgcctcatcaaagctatcaaccgcttccaccgaaagaaggaggccgctcctcctcccccgccccagccctcgcaggaggaagtgctgctggcggagatccgagacctgctgaaggagaggacatgatggaacagcgcctgcaatcgggtcttgccgccctgaacctccctgtggagggaatccctgctctggtccggtatggggatctgctgatcgagaccaacaaggtgatgaacctcaccgccattacggacccggaggatgtggccactctccactttttggacagcgccgccctgctgaccctggagtccttttccggaaagtccgtggtggacgtcggcaccggtgccggttttcccggtctgcccctgcgggtgctggagccctccatccgcctgacgctgctggactccctgaacaagcgcatccagttcctggagacggtgtgccgggagctggacctccccgatgtggcctgcgtccacgcccgggcggaggaatttgccgcggagcaccgggaaacctttgatttagcggtctcccgggcagtggcggccctgccggtgctgtgtgagctgtgcctgccgcaggtaaagcccggcgggaagttcctggccatgaaatccgtggagtcagacgcggagctggccgcctcacagcacgccattgcgatcctgggcggcgccgtggaggcggtccgggactatgccatccccggtacagatgtgcgccaccggctgatcgtggtggaaaaagtgaaaaaaactccggaaaaatatccgagaatgtttgcaaaaatcaagaagaatcccttataatacatttgtgagcagttgaaaggaagtgccgcctgatgacgtctccaggacagtgcattgccgtcgcatccggaaagggcggcaccggaaagacctcctttacggcgggtgtaggcgcggctctcgccctatctggccggcgggtgctgtgcctggactgcgacatcggtctgcggaatctggatctggccctgggcctgtcggaccggacgctgatggacttctcagacgtggcgcagaaccgctgttccctggaactggccgctgtggaacaccccaagatccccggccttttcctgctgaccgcgccggcgcgtccccatggtcgcccggtgacggagatccagatggcagatctgctgcgggaggtacgcaggcggtttgacttctgtctgctggacgcacctgcgggcctggggcggggctttcagctggccacctgcgccgcggaccgctgcgtggtggtgaccactgcggacgcctcctccctgcgggacgcccagcacaccgtcatggagctggatcgcttcccatcaggcgccctgcacctggtggtgaatcgggtgcgcaaaaagctgctgcgccagctccacgccaccattgacgatgccatcgacaaggccggcctgccgctgctgggagtggtccccgaggatgacgccctgccgctgtgtatgaaccggggtgtgcccatcctgctggcggacggccagagcgccgcgactgcctaccgcaacattgcgaaacgcctccagggggaacgggtccccctgctgcggatcagatagagaaaggagtctttcatgaacatcgccctcatgtcccacgacaacaagaaggagctgatggtgcagttctgcaccgcctacgccggcatcctgtcccaccacaacatttacgccaccaacaccactggccacatggtggccgacgccacgggcctgaatgtccactgcttcctgtcctacgcccacggcggcagccagcagatcggcgcccggatcgcatacaacgaattcgacctggtactcttcttcaacgaccccaacaacgaggctatggtgggagatgtttcctatatctcccggctgtgcgaccagaacaacatcccctttgccagcaatctggccacggcggaggcgctggtactgggtctggcccggggcgatttggactggcgctgcatcgtcaatccctccaaccgtcccatcgcttgacatttttccccaaagcgcatacaatcaccctgttgattcatttgcaccgcgcggatgccgcagcagtactccaatcgccggccccacagagaggggcgcaccgctgagagcggcccggccggcctggacgaaggacagcggcggagcgggggcggagacgcccacggcaccctccccgtagcacaggaggcaaaaaggaggctctataggccttgaatttgggtggcaccacgaagcggaatcgctctcgtcccaaagccgcgggacgggagcgttttatcattttgcgcccgcggtgcatcccgggcagcgacccgcatcccacgaaaaaggagttttgacgatggctaaaatgaccccacggacactgtccggctttatggaactgctgcccggaccacagcagcagatggagcggatcatggagatcctccgccgtacctattccctctatggctttacccccctggacaccccggtgatcgagtccagcgaggtactgctggccaagggcggcggcgagacggagaagcagatctaccgcttccagaagggcgacgcggatctggcactccggttcgacctgacggtccccctggcaaagtatgtggccctccactacaacgacctgaccttccctttccgccggtatcagatcggcaaggtgtaccggggtgagcgggcccaacggggccgcttccgggagttctatcaggcggacatcgacatcatcggagatggcaggctctccatcatcaatgaggcggagatccccgccatcatctacaagaccttctccaccctgggactgaagcggttccagatccgggtgaacaaccggaagatcctcaacggcttctacgccatgctgggtctgacggagaagtccggtgacatcatgcgcaccgtagacaagctggacaagatcgggccggagaaggtgaaggccatcctcaccggcgacctcgccgtgactccgtccgacgccgacgagatcctgaagtttatcgccatctccggcggaaacgacgccgttctctccgctttggagggctaccggggccggaacgaaatcttcgaccagggtcttgaggaactgaacacggtggtccggtatctggcggacttcggcgtcccggcggagaatttcgccgtggacctgaccatcgcccggggcctggactactacaccggcaccgtctacgagaccaccttgctggatcaccccgagatcggctccgtctgttccggcggccggtacgacaatctggcggagtattacacggaccgccagcttcccggcgcgggcatctccatcggcctgacccggctgttctatgtgctgggagaacagggtatgctgaatccggacctgcccaccgctccggcggatgtgctgatcctgcccatgacggaggacctgtccgctgccatctccctggccaccctgctgcgggaaaacggcatccgctcccagctccactgcgaggaaaagaaattcaagcagaaaatcgcctatgccgacaagctgggcatcccctatgtgatctttctgggggaggacgagatcagctccggcgtggtggcctgcaaggacatggccaccggcgagcagacaaagctggaacccgccgccaccgtctaccgcattaaggcgggtctcgcggaacgggaaaagggcaccgtcatccaggagtaattccctgccccacagagatactttaacgccgaatttcacctgcggagacaaccaaatcgcatctcaagcagtccaagcagaaatattttctataaaaaatacaagcagtatttactagaggtgtttctatgaagaaccggaagcgtgtctgggtgcctttgttggtcctgctgctggtcgccgcgatctggtacagccgtccggtaacattgccggacctgatgaagggccaggaactccaagagatcaacgtcctgatccgctccctgggggactgggcccaggagccagagaccgccacggtgtcggtacccctcacttccccagagggggcggccctgctgaaacagctccaagacctctccttctgccgttctctgacagacccgctaatcaagccccttgctcaggcggtgaatgccagccatgggtccgtcttctatgaggcgggagactggatgttctccctctccctcgccggtacagatggcgattttgctgtgctgaactttaccgtccgggagtggtcctatgctgctccgggacaggcggacttctacggctgcaccgtcccggacggagaggccgttggcaggggccttggggaacagctctgggctctggcagcgaaatatgatctcaattcgtaatattttttatataaatttctatttgtaatcacatttccacacagaaaggaatccacaatcatgacacagaatcgcacccatacctgcggagagctgcggctctccgacgccggcaaggccataaagatctgcggctggctggaaaacctccgggaggtaggcagtgagctggccttcgccgtggtccgggacttctacggcaccactcaggtggtggcggagaccgccgacatggtggccctgctgaagtccatcaacaaggagtccaccatctccgtggagggcaccgtccgagagcgggacagcaagaacgccaagctgcccaccggcgagatcgaggtggtacccggcaaaattgaggtgctgggccgctgccagcacaacgagctgcccttccccatcaaccgcagccgggaggccgacgaggccacccgcctgaagtaccgctatctggacctgcggaacccggcggtgaagaacaacatcatcctccggtgccaggtagtggccgccctgcggcaggccatgacagagcatggcttcctggagatcaccacccccatcctgaccgcctcctccccggagggtgcccgggactatctggtgcccgcccggaaccaccccggaaagttctatgccctgcctcaggcgccccagcagttcaagcagctgctgatgacctccggctttgaccggtacttccagatcgccccctgcttccgggacgaggacgcccgggcggaccgctcccccggtgagttttaccagctggacatggagatggcttttgcctctcaggatgacgtatttgccgtactggaggacgtgctgccccccatctttgccaagtacggcaaatacgaccgggccagctccgcgcccttcatgcgtatcccttacaccgaggccatggagaagtatggctccgacaagccggacctgcgcatcgacctgacggtgcaggacgtcaccggcctgctgggcgcctgcggcttcggccccttcgagggcaacgtggtgaaggccgtggtggtcagcgacttccacgagacccggaaattcatcgacaagaccctggcggatgtggaggtggtctccggcggcaagccctactggttccgcctggacgaaaacggcgaaatcgtgggcggcatcgccaagtttgtccagcccatcaaggagtctgtggtctctgccctgggtctgaagcccaacgacttcgtggccctgtccgccggcaagctgggcgctgcccaaaagaccgccggcacgctggtaaagactctgggcgccgccgtccccggtcacatggacaaggagcagtacgccttctgctggattgtggacttccccatgtacgagatcggcgaggaatccggcgagctggagttctgccacaaccccttctccatgccctccggcgggctggaggtcctgctgaaggcggagcggggcgagatcgatcccctcagcatcaccgccgaccagtatgacctggtgtgcaacggcgtggagctcagctccggcgcggtccggaatcacgacccggagatcatgattaaggcctttgagatggtccggctgggcgaggaggacgtaaaggccaagttccccgccatgtacaacgccttcacctacggcgcgccgccccatgcgggcattgcccccggcgtggatcgcatggtgatgctgctggccggggaggactccattcgggagatcatccccttccccatgaacaaaaacgcccaggacgtgatgatgagcgcccccagcgaggtcacgcagaaacaattggacgagctgcacatcgccatcgtcaagccccaggactgacctgtaaatccggaataaaaaagagacggaccgcatttctgcgttccgcctctttttttccactttccggcatcatcccacgcataccaccttcatgactccggaggtcaaagcctgtcaaaccgctggccctgggtattgcaccagaaatggtcctccgccagaccggagacgtaataggtcagcggcccggagaaatcgccggattcgtggatatctatctccaacgacggacaccagcccatgccgccgcggtcccgcagccgggcagaaaaggccgtttccccatagtagtccaggtaggggattaccacccgacaggtgccgctctggaagatcagcagctcctgcaaggtgctgtcacaccagatgccgtcaaacgcagccaaatccgcaggccaggcagagggctcctcctgccagagcgtggtctccgtccccagaagcctggtgaaaaagggggacagggaccggaccgccgcccggtaggtctcttctcccagctccggcgcctcacctgctttccgcaggctgtccgccctgtccagaaccgctgcaaatgccactgcggaggctgccggttccgcctccatctcctccaaaagggccaggaccacgtcctcctccgggatcgtctgtccagagcccgcccagtccagcagggtccgtgccgccgtctccggtgtctcctccagcacttgtacagccaccatctcccaggtggtctccgagaccgtcccctccccctggggactccccagcagggcgatcattgccatcagtagagccgccatccgcatgttgtcacacgctcccttctatttttgccagcataccacggggtccgtttggattccaccacaaatcagtaacagtcttttctttcgggcctggatgtgatacacttcatatcatcactccacagcagaaaggagctcttatgaaacgactttttacaattctgctggctgtcctctccctgttgagcctgactgcctgcggcggctcccccacagaggagacttcccaggaacccttagtggacattcagccccaggagccggaggcgcccccggaacccacgccggaggaactggccgcccaggaggtggaggacctgcttgcctccctgaccctggaggaaaaggtcggccagctgttctttgtccgggtacccgacacagacgcggtctccgacgtgagcacctatcatctgggcggctacatcctcttcggccgggatacggcggacaaaactgccgatgctttgatccagaccattcagagctatcaggacgccgcggctgtggacaccggaatcccgctgctgatcggcgtggacgaggagggcggcacggtggtgcgggtcagctccaatccccatctgcgggcctccaagttcccctctcctcagaaagcttatgcctccggcggcatggaggccgtgctggcagatacccgagagaaggacctccttctctccgccctgggcttcaacgtgaacctgtccccggtggcagatgtgtccaccaaccccgccgactttatgtatgaccgcaccttcggccaggatgcggccgccacagcggactatgtggcccaggtggtctcgcagatggcggaggacggtatgggcagcgtcctcaagcacttccccggctatgggaacaatgtggatacccacaccggtatcgccgtggaccagcggccgctggagtccttcacgtcctccgacttcctccccttccaggcgggtatggagagcggcggcggaaagaccgctgtgctggtctcccacaatatcatgactgctgtggatggagatctccccgcctccctgtccccgaaggtccacggcctgctgcggacggacctgggctttgacggcgtggtgatgaccgatgatctggccatggaggcagttgcagcgtacagcgccgacggggccgtggcggtgatggccctggaggcgggaaacgatctcgtcatcaccaccgactaccgcacccagatccccaaggtcctggaggcgctggaaagcggcgccctgtccgaggagaccatcgacaccgcctgccgccgggtgctgacctggaagcagaatctggggctgctgtaacatacctcccggtcccatcccctgacgaaaggaagttttccacatggaaacggaaaaactctattaccaagatccctacctcaccgccttcaccgcccgggtgctctcctgtgaaaaatccaaatctggctgggccgtagtgctggaccgcaccgccttctacccggaggggggcggacagccggcggaccacggcactctgggcgcagtccaggtcacggatgtccatgaaacaaagggcgtgattttccacacctgtgacggccctgtggagatcggcacccaagtggcggggccgttgactggccccgccggttcgaccacatgcagcagcactccggggagcacattctctccggcctgctgtgctcgctgtaccactgtgacaacgtgggtttccacctgggggccgacacggtgaccatcgactacaatgccgagctgacctgggaacaggtcatggccgcggaaaaggccgccaatgaggtgatctggcaggacactccggtggacatcaccttccccgcgccggatgcgctggcccgtctgaactaccgcagcaagaaagcgcttaccggccaggtgcggatcgtggccttccccggggcggactgctgcgcctgctgcggcacccacgtgcgccgggccggtgaggtggggattatcaagatcctctcctgccaaaagtttcgggagggggtgcggctggagattctctgcggatcgcgggcctaccggtatctctcccaggtatacgaccaggaccgcgccgtggcccagctgctgtctgtaaaaccccaggacaccctggccgccgcagagcggcaggcggaggagctggccgccgccaagcagcggatgacggagctggaggatcagctcttctccctccgggcccaggccctgacagaccggggagatctgctgcttttggagccccccacgcggccggacggagccagaaagctggcagacgcagccgcaaaggcctccggcggtctggcggcggtgttcgcgggagcggagtcctcctacgtctatgcccttgtccaggccgatggggcggacatctctcccctggtgaagcggctgaacgccgctctttccggccggggtggcgggcggaacggctttgcccaaggcagcgtgcaggcggaccggaccgccatctgtgactttttccgcaaggaggggattgaatgtcctacgtgctgatcgaacagaatcttgaggaagaggacgagccccggttcatctacgcggaactggacagcgggcgccgggaggtccggcgggtggaattctaccccaatggcctctgctttgcctacggcggcgactacggccgggaggaggctctctcccctgccccctacccggaggacctgcggacgctgaaccgccccggggaggtcaccgcccgcgccatcactccggccgcgttttgggagatctggggacaggcccaggagcggccggacggctttatggggatgtttgcctgatgagaagaagcatttgttttgccgggggctgcttctggggcatggaggccctgtatcgccgcctgcccggcgtactggatgtcaccgccggctatgccaacggagacacggcagatcacgccaactatgacgatgtctgcaccggccgcaccggcttccgggaggcggtgcaagtggcgtatgaagacgggactgtctccctgccccacctgctctttgtcttttttgccgccatcgacccggagactcccaaccgtcagggaccggacgtgggcagccagtaccagaccggcgtatactggatggacccggcggacgagggcatcatccgctccatcgctgtcctggaggccgcggccgttcccttcttcgccgtggagctgaaggccctggcgtgtttctatccagcggaagaattccatcagcggtatctggaaaagcacccacggggctactgccacgtggccccctggaaactggccgccctgccggacttccccttttccacaaagacctatacccgtcccgcaaaagagctgctgcagacctggaaagaagccggagaagtgtctttctgacgggcgggggaaactctgttttccacaggctgaccatatttgtgtaaataaaagcgccgcaggcggatgcctgcggcgctctctttgattcagcttccgtcactggacgggctcgttcatctctgcagtgatatactgttggccgtacatggcgtcgtacagcacatcctcccgcagctgcagcagctcccgggcctcgtcggagagagccgcctcctccacgccggcgctgggcgtccccgtgccatccacaaagtacagctccgtgttggtgagacacacctggctcaccttctccagcagcgcccagtaccgggtgaccggctgaccggtcagctccagcagctgggggccgatggcggtgatgctgctatcccgccgggtgcctgcctgcccctggagcaaggccgcatcattggcccagatcagatagtccgtggaatacaggtcgctgatctcctccggggtccagcccaccgtgtcgttatccgggcagaggcccaactttgtgtacactgtgtccccgtccgtcatgaacagattgggcctgtgatccccgaagaacaccacgatggtaggctcctcgctctcccacagggcgtctgtcagatctcccagggcctgatccgcccgggtgatgccctccagcatgacccggacgatggccatatcctcctcgccgaggctttcgctggtgacgccgatctgacactcatagttgaatttctccgggtcaaagggctggtggttctccatggtgatgccgtagagaaacgcccgctccccgctgctgttgatgtcctccatccggtccagcatggcctggaagaagtaactgtcccgcatgtaatacccgccgtagatgcccccctcccagggaaagtccagagcctggatatctgcggagaacagaaggtcggaaaagcccagcctgggataggtcaccgttcgattatacaggctgtcgttatacccatggagcatctccgcccggtagccgctcttggtatactgctccggcagggcgtcaaatttctcataggcgtcatcctccaggaagcagatgttcgtcccagcaccgaagtccagctccgtaatgccgtacagcatggacatctccagatagccggtgccgtagcccagatagtggctgtggaatgtgccgctgatgccctcgctctccagggcatggaagttctccaggggatcccgttcatactgaaggcccggcagccgggtcagatcgtagaaggactccgactgggccacgatgatgttgggctgcaccgccgctgcgggggcgtcggcgctgtcctctgtcaggatctcgtcgatccgggccaggacctgctccatgtaggcttcgctgtatccctccgggctcttcttggcctgaagaaagcagtcccgccagagactcagcgtcaaaccgtaggtgtcgtggctgttggccgcagccaggcgggtgttcacatccacctgaaaaaccgcccccgccgcctgggctccctgtgtggaaaacagcccaatggtcagggccagggaaacggaaaaagtgacaaagcggcaccgcccggtgagcagcgtcagccgccgcaccagaatcagaatccccacacacatccccagggcgatcatcgccatccagaaatccaccggcgggcgcagctctcccgccacaccggccacctctcccacctgtgccgccaggccgaagtccgccagcaccagtggcgtgccgttgatagctgtcttgaaatagtccaccagggacagcaccagtccggcaacccccaccagtatagcggaaagccacaatctacccagcagcgcccccagggtgaacaccacagcgccgtaaaggacgccggtcagcagcagataggtgggccatttcacgaaccactcccacacgatggagagggaaccggtaaccacccactggacggccaccgccacagccagccccatgcaaaggctgccgcccagaaacatgacccagcgcagccacaccggccccaacgcccggggccgcttctgtctcttcaacacttctacctcatttcccaggttataaaaagggtcgcggggatttcccgcggccccgataatctccgatcagtatgccagtttctccgccagatagctcttcagctggtcgacgggcagccgcacctgccctcccgcaaaagcactgcttttgcgggacccctgtcccatctcattcctcgggcggaatgaatccgccctccggcgagattttgcctccggcaaaatgctcggacgccgcgccgcggcgttctggagcaggatcgacacaggcatcagtatgccagtttctccgccagatagctcttcagctggtcgacgggcagccgcacctgccctcccgcaaaagcactgcttttgcgggacccctgtcccatctcattcctcggacggaatgaatccgccctccggcgagattttgcctccggcaaaatgctcggacgccgcgccgcggcgttctggagcaggatcgacacaggcatcaatatgccagtttctccgccagatagctcttcagctggtcgataggcagccgcacctgccctcccgcaaaagcactgcttttgcgggacccctgtcccatctcattcctcgggcggaatgaatccgccctccggcgagattttgcctccggcaaaatgctcggacgccgcgccgcggcgttctggagcaggatcgacacaggcatcaatatgccagtttctccgccagatagctcttcagctggtcgataggcagccgcacctgctccatggtgtcccggtcccggacggtaacgcagttgtcaccagccttatccgcatcgcccacggtgtcgaagtccaccgtgatgcagtagggcgtgccgatctcgtcctcccggcggtaccgcttgccgatggaaccggtgtcgtcaaagtccaccatccagtccttgctgagctccgcctggatctcacgggccttttcggagagcttcttagaaaggggcagcaccgcgcacttaaaaggcgcgatggccggatggaaccgcatgacggtgcggacgtcgttcttttctgcatccaccacctcttcatcgtaggcttccaccagcagggccagggtcatccggtccgcgcccagggagggctccaccacataggggatatagtgctcgttcttctcctgatcgaaataggtcagatcctggccggagtgctcctgatgctgggtcaggtcgtagttggtccggtccgccacaccccacagttccccccagccgaaggggaacagatactcaaagtccgtagtggccttggagtagaaactcagctcctcgggctcgtgatcccgcagccgcagattctcctccttgatgttcaggcccttcagccagtcgtggcagtacgtccgccaatactggaaccactccagatccgtgtccggcttacagaagaactccagctccatctgctcgaactcccggatgcggaaaatgaagttacccggggtgatctcgttgcggaaggacttgccgatctggcacacgccgaagggcaacttccggcgggtggtccgctggatggcgggaaagttgacaaaaatgccctgggcggtctccggccgcaggtacacctcgttggcggtgtcctccgtgacgccctggtgggtcttgaacatcaggttgaacttgcggatgtcggtgaagtcgctcttgccgcagccagggcagggcacctggttgtcccggatgaatgccaccagctcctcctgggtcatggcctccacgttcacgtccatgccgtgctcctgcacatagctctccaccagcttgtccgcccggtggcgcatcttgcaggccttgcagtcaatcagaggatcgttgaaggtggatacgtggccgctggccacccacacctggggattcatcaaaatggcggagtccagtcccacgttgtagggattctcctggacgaatttcttccaccaggcccgcttgacattgttcttcatctccacgcccaggggaccgtagtcccagctgttggcaaggccgccatagatctcactgccggggaatacgaatccccggttcttacacagggccacgatcttctccatggtcttctcggtgtttttcatgttccattctcctttacggcggcccggacagaaaaaacgccccgagccggttttcggctcagggcgaacaatcagtccgtggttccacctgaattcgcgcctggctgacgcgcactcttcacccggtaacggcggggaccggcagggcatttccgccccgcggctccagggtgcctgttcttccgcctccccgcaagggctcacaccagccgccctctctctttgccggggtatgggggatacttctccctgtcactgccttttggatatcgtgagaactgtatcacgttttcatcagaatgtcaaggccgagtcccacagaagccgcaccaggcagggcactctctcacccggaccctggtctgatcccttatccgaagcgcagaaaaaggccgccccatagggcggcctttcccaatttactttttctcccgatcgtaggccacgatcacccggcggttgggctccgttccggtggagtaggtcgtcacattgggcacatcctgcagcgccgtatggatcacatgccgctcataggcattcataggttccagtgtcacgctgcggcggtacttggtgaccttggcggccaccttccgggccagatgctgaagactctgctcccgcttttcccggtaattctccgcgtccagctgcaccctcacccggccgctgccgctgcggttcaccgcatagctggtcagctgctggatggcgtccagagtctcgccccggcggccgatcagtgcgcccagattcttgccctccaggatcaccttgtagcggcccttctccagcagatagatgtggatctccgcagcactctccatctgctccagcaggccggagaggaacttacggatggcctgggccttctcgtcatccacttcttcgcccagtgtctgcacgggagcggactgccgggtcttctcctccggggcgggcgccggcgcctccgccggcttgcgctcctgtctgggcggcttttccgctttggggggcttaggccgctcttcctgcggcttctccttgggggcaggagcgggggcgagaacctcctcttcctcctccgggccgtagctcacccggaccttggccgggctgctgcccagacccagaaaaccggactttgctcgctccaaaatctcaacggacacatcgtcccggtccaggccaagctgccgcagggcattctggatggcctcatcctcggtcttgcccgttacatcaataaactgtctcatggcgtaacaagctccttactgatcatcatagcggtcctccttgtaggaccggccgcgggcatagggccggtctcccacacggcccgcttccgtggtgctggtggccgcctttttggccttcagggccttggcctcctgcgccgcctgccgcttttccttcaggctcttcttctgtgcggcctgctgacgctgctgctcctgaagcagcttggcctcctccatccgcttctggcggtccgcctggatcatctcctgccgggcgtcctcctcttcctgcagcttcttggtgtagaacttgcccaggaccatctcctggataatggaaaacgcgctctgggcagcccaatacacgcccagggcggcgggcacgatgaaggcgatgtagatagacatcagaggcatcatccacatcatcatcttggtggagccgttggcagccgcagtctgggcggactggctcatgctgaccttgctcagcaggaagctgaacacaccggaaatgatgggaatcagaatcagtcccaccgcggccagcgtgatgcccgtggagaggctgctgacagcgctccagggcgtctggatcaggtcaatccccaggaagtggtagtcgatgttcacccagccgggatgctctgcaatgaagtcggggaactggctgttaatgatgttggaaatggcgatctgctcatagccggggctggccacgatctcaatgccggcgccttcaatcagacttctggccgcattcactaccgccagaccggcgtccttgccgccgaagttcatgaagtagacaatgggctcccggatgatatagtacagggccatcagaatgggcaggggcagaaagctccacaggcagccgctcatgggattgaagccctcttcctggtagaacttctgcatctcctcctgcatcttcagctggttgttggcgtatttcttctggatctcctgcatcttgccggacatgcggctcatccgcaccatgctcttcttggacttcatctggaagggcagcaggatcagcttgatgaccagcgtgaacaggatcagggacacgccgtaggaccctgtcaggttgtaaaacagccgcagcagggccgcaaacgggatacaaattgcgtatccgatggttgaaaacatagatgcttcctccaaattgtaatgggacccgggctttcagcgcccgcagagcggagcatttccgctttcggcctgtccgcattccgcagtaccggctgacagacggccggacagcagcacagggtccggcagaggggcttgtcccctcctctcatgggaccggatcatatcctcccttgtgaaacggattacagcgcaggatacgccggaacgccagccagccgcccttgagggcgccgtacttctcaatcgcctccagcgcatattgggaacaggtgggaatataccggcagcaaggcggccggtacggggagatggccacccggtaaaatttcaccagggccagcaggacctttttcatcatgaccggtcctccagcagctccagcttcctgcaaagacgcaggaaggtatcgttcagctccttccaggaggcagtcagggtccgtcccctggctaccagaatcatgtcgtacccctggcggagccgtccggaattgagccggtagacctcccgcaggcggcggcgggcccggttgcggaccaccgcatgacccagcttgacggataccgtcacgcccaggcggttgtgccccagccggtttttccggcagtaaagcaccatccctccgcccacggcggaggcgcccttctggtacagccggcggaactcataattctctttcagggtcactgcccgcttcatgctgccacctgccttctcccatttgatacatctgacacaaactcaacgagggacggaggaatcacagaattcccgccgtccctgaagacgttgttcaagtgtctcccgcacggtccgtttctcagtaggacagacgggcgcggcccttggcgcggcgacgggccaggaccttgcggccgttggcggttgccattctcttgcggaaaccgtggaccttctggccgtgcagcttcttgggctgataggtacgtttcgttgccatgttgagacacctcctgtcagaattgcggcccttttgagggcggcacttactcgacaccgcctaaagggcggcgcagtaaacagatcaagaccgcatgatcgcggcgcaaccgatattatacagactgtttgaaaatatgtcaactaaaacttaaaagttttgcgaaatttccgtatttttttcttttttcagttgcgattctcgaaaatttcaaaatctggtgtcccatgctgtccaaagccgctatatcttgttgcctgtgcaggcggatctccttggttcttattattagaataagtgttgtaatttccggctgtctttggtataataaagcgtactgccatgtctattttttactagagagaggtgtttccttttgaattccgtcgccgacgtgtgggacaatgtactatcccagctgaagggcgagctctcggagaccaccatcgccacctggttcgacgaattggaggctgtggacatccagggcaatacgtttatcctccactgttccaacgactttaaaaaaggctatatcgagtccctgttcatgaaaaacatcaaggcctcccttcacgacattttctccacggattttgaagtgaagattctggatgacctggattacgcagagctcaaggataaccgcccgcaccgccagagtgagcggttcacttccgcggagttcacattcgagaccttcgtggtgggcccttccaacaagctggcttatgccgcctccgtctccgtggcggagcatcctgctcagaactacaaccccctgctgatctacggggactccggcctgggcaagacccatctgatctatgccatcgccaacgtcatccgccggaacgacccccggtccaagatcgcttacgtcaagggcgacgacctgaccaacgagctggtggatgctatccgggagggtaagactgcggagatgcgggagaagtaccgtcaggcggacctgctgctggtggacgacgtgcagttcatcgccggcaaaaagcagacgcaggaggagttcttccacaccttcaacaccctgtacgagtccggccggcagatcgtcctgacctccgaccgccccccctctgagatgacccagctggaggaccgcctccgcacccgatttgagtggggactgctggtggacgtagcgccgccggattttgagacgcgtcttgccatcgtgaaaaacaaggccgccctgctgggcatggagctgccggacaaaatctccgcctacatcgccgaaaacgtcaccgccaacgtccgccagctggagggcaccatcaacaagatcctggcctacaaggatctgctgggcaacgacaccgacgaagaaaccgtcacccgggccatccaggacatgctgcgccgcagcaacgagtatgtccccacgccggaggccatccttgagtatatctccaaatattacagtctggacgagtccgtgatccggggccagcagcgggtgcgggacgcggtctccgcccggcagattgccatgtacctgatccgctccatgacgaacctcagtctggatgagatcggcaaggtctttgacaaccgggaccactccaccgtcctctactccatccagcaaatcgaaaagaagatgaagaaggacgctgcgtttgccgaaatggtgaaggagatcaagacgaatatcaactccaagcggtgaccagatttctccacatcttccgtggaaaagaaaaacttccctgttgaaaatggtctttcaaaaaagtccgtggaaaaatccccggatccttccacatcccctgtggagcctcaaaatccgacagcgcaagcctttccccgccttttccacagcttttttccctacggctgctttttctaaaaaatacatttctttctttttcaaaagagcgattccgacccatatcttcaaaccccgactagagaggaagtgcatgcatgaaattctcctgtgaaaaagcccttctgcaaagcgccatcgccgtcaccagccgcgccgtggcccagaagagctccattcccgcgctggaagggctgctgctccacgcggacagccagctgaccatttccggctacaacctgcagaccggcatccgtacgaaggtctccgccgatgtaacggaacctggcgagattgttttaaacgcccgcctcttcggcgacatcatccgccggatgcccgacgatgtggtggttttcaccgcggatgacaaacagctggttcatctctcctgcggcgatgcggactttgatatcctgggcctctccgcggcggattacccggagctgcccatggtggaggatgatttttccgtctccatccaacagaagctgctgcgtgccatgatcgaggagacggccttcgctgtctccaccaatgagagccgccccatccataccggtgccctgttcgagatcacggaccagggcctgactatggtggcggtggacggattccgtctggccatccggcgggagccgctggaaaagatcgacggcggcgccttttcctttgtggcgccgggcagcgccctgggcgaggtgaaaaatatctgttccgacgtggaggatctggctgccgtgaccctgggcaaaagtcatattctatttgaggtaggagacacggagttgatctgccgccggttggagggagagttcctggattataagaatgccatcccacggaagaatcccatctccgtcatcgcggacaccaaggccctgatcgagagcattgaccgcgtcagtgtggtgatctccgaaaagcagaagagtccggtccggtgcctgtttgaccacgacaaggtgctgctctccgccaagaccggaaacggcgaggccaaggatatctgccgcttgtccggtgacggcggcgggctggagatcgggttcaacaaccgctatctgatggaggctctccggtacgcgccggcggacacggtgaagatcgagctgaataccggcgtctcccccgccatcatcgtccccacggagggggaggaaaacttcctctatatggtcctgccggtgcggctgaagagcgcggagtgagcagatggagacgatcacgattcacacggagttcatcaagctccaggacctgctgaaattcgccaatctggtgtcctccggcggcgaggcaaaggagcggatccagggcggcgaggtcaccgtcaacggcgagatctgcaccatgcggggcaaaaagatccgccccggagacgatgtggccttccagggcgcccattacacggtggcctatgcggattcttgagctggagctgcagcatttccgcaactactccggccagcgggtatcctttgacccggactgcaatgtgatctttggggagaacgcccagggcaagaccaatctgctggaggccatcgtctacctctcctgcgggaaatcccccgggccaggacggaccgggagatgattgccttcgatgcgcccgccgctgtgctggaagccgggatctccgcccgagaccgggagttccgcacccgggtggagctgtaccgggaccggcggcggaagatgtgggtgaatcaggtgcctgccaaaaacagcgccgccctgagtcaggtgtaccacaccgtattcttctgcccggatgacctgtatctgatccgggagggggccgccgcccggcggcgcttcatggacaccgcactctgccagttgcggccgagatacgcggccgctctggcggagtaccaccggctctatgaccacaagacccgcattctgcgggacagtgaggagcggccggatctcctggagctgctgccggacttcaacgagcggatggttcgtttcggcgctgtgctggtccactaccgccggcagttcgcggaggcgctgaaccgctatgccgcccgccaccatcgggagtgctccggcggaagggagcgcctggaggtcacctatcagactgtttcctccgtcacggacccggcggcggaggtggaggtcctcacggagcagctccgggcccacatggaatcccaccagggggcggagcgggcctcccggatgtgcctctccggcccccacaaggacgatctggtcatcaccatcgacggccgggaggccaaatcctactcttcccagggtcagacccgcaccgcggctctggcgctgaagctggcggagcgggaaatctaccagaacgccaccggcgaatacccggtgctgctgctggatgacgttctcagtgagctggatccccgccggcaggagttcgttctcaaccgcatcgcgggggacaggtgttcatcacctgctgtgaggatgaccggctgccccaaatgctgggcgggaaggtgttccatgtgaaacagggcgccatcagtggatgatccctgcggccaggcggtagcctgttcaatcaaacacaacagatccaattacaggcccccaacatgacaaaatggaggtaaccgtgatgaattagtacgcagtgcttcccattctggttttcggcggaccagctgctggctttctctgggagctgatcgtgggattggtctgccggacaaggcgctatctgctgtgggtgcctgttctagcgggggcgctgggactggcgctgtgtgtggtgtctcctttccataccctcccgttctccttcctactgctgtgctgggggctgtacggtggcggacttctgtttggatggagtctgtccaacctgctccgtggcggggaggaccactttcagcggtatgccgtccgtgccgttgccctctgctccggtgcggcgctggccatcggcttcggtgttctgatctcccacgagatgcgcagcgccacctataccatggtggaagaagacaccagcgaggagcgcgttctggcagagatcccggagctggccattacagagacggaccgggaaatcctctccgccctggaggagagtccctccgtccaggcggccgtcgccggaggggaacagttcatcgatctgccaccgtcagaacacgaggacatccacgcgatcctgtcggaatttctggatgaagagcgctaccagttttccgacgcgggcgtcaccgcccagtccggggaggtcacctccctgtattacgatattttcgatcaggagaggaatgttcggatcatcgtcatgggcctggacaccggaaatcttaacaaggtgatcactgtctacgatggagatccggaagaggaattgtccatggtgatctatgaaaatgacaacggcgccctccgcaaaatgaagaagcagcggatgtggttttatgacttctatgaaacagagttagaatgaggcacggatcgctccctctacaagggcagttccgcatccgtaagcggcaaagtcgccaacagataccgaaaggagaccaccatgtacctccacatcggccaaaacgaaattcttcccgaccgccgggtcatcggcatctttgatctggacaaatgcagttacggcaagcggacccgggagtatctggcggccgcggagaaagagggcgtggtgctggacgtgtccggcgagatccccaagtccttcgtggtgtgcgatcacccctatcaccggcagatcgtgtacctcagccagctgaattccaccaccctccagaagcgggcggagagcggaaacctggaatgagccagggggagatcccatggcggcatatacgacactggtaaaccttccccactttttatcctcgttcacatccctggagacaggaactctggtgctctttctggcggcagtgttcacggtgcagctggtcctgctgcaaaattacagcaggcgccggagacggctggtccagcccgctgcttctggtgtacagtgcgttccttctgctgctgtattttgcctggatggcgctgttcaccgccctcctggctctgctgacatatctgattttgaagaaattacgcacttgattccaacttacatggttcagggcaaggagaaacgggccggaggcggctccggcccggctcttcttgccttggaacggatatgaatatcctgaaaggagaacctgcatggcagaaaatgaactgttgaactccactgcggtggacacggccaacgagtacgacgcatcggaaattcaggtgctggaaggcctggaagccgtccggaagcggcccggcatgtatatcggctccacgtccacctccggcctgcaccatctggtctatgagatcgtggacaacgccatcgacgaggcactggccggctactgcaccgacatcctggtgcgaatcaacgagggggacaccatcaccgtggtggacaatggccgtggcatccccgtggacatccaggcccagaccggcaagcccgccctggaggtagtgtacaccgtcctccacgccggcggcaagttcggcggtgggggctacaaggtctccggcggtctccacggcgtgggcgccagtgtggtgaacgccctttccgaatggctgacggtccaggtccaccgggacggacatatctatgagatgaagttctccaggggcaatgtgacccagcccatgaccattgtgggagatacagaccacaccggcaccactgtcaccttcaagccggacccggagatgttcgaggatacggagtacaattacgataccctccacacccggatgcgggaggaggcgttcctgaacgctggcctgcgcatccgcactgtggacgcccgccccggacgggagcaggaggacaacatgtgcttcgagggcggcatccgggagtttgttacctggctgaacaagagcaaggatgtgcttcacaacgacgtgatttacatgtccggagcccgagaggactccgtggcggaagtggccatgcagtataacgacggctacaacgagacgatcctctccttcgccaacaacgtccacacgccggagggcggcatgcacgaggagggcttcaagcgggctctcaccaatgtgctgaacgcctacggccggaagatcaagctgctgaaggacgacgagaaggtctccggcgaggactgccgggagggcctcacctgcgtcatttccgtcaagctgacagaggcccagtttgagggccagaccaagtcgaagttgggcaacagtgagatccggaccctggtgaataacatcgtctccgaaaagctggagatcttcctggaggagaacccccaggtgggccggatgatcctggataaggctctcactgccaatcgggcgagagaggccgccaaaaaggcccgggaatccatccgccgcaagacggctctcggcggcgccgccatgccggataagctgcgggactgcaatgagaacaatccggagctgacggagctctatatcgtcgagggagactccgcaggcggctccgccacccaggggcgggattcccggttccaggccattctccccctgtggggcaagatgctgaacgtggagaaggcccgggcagacaaggtctacggcaacgacaagctccagcccgtcatcacggccctgggcgcgggcatcggggatgagttcgatctgaacaggctccggtatcacaaggtcatcatcatggccgatgccgatgtggacggcgcccatatccgtactctgctgctgaccttcttcttccgcttcatgcggcccctgatcgaggagggctatgtctactccgccgttccgcccctgtataagctgacccgtggcaagaccacccgagtggcctttgacgacatccagcgggagaagatcgccgccgagatgcggggcgacaaccccaacgccaagatcgacatctcccggttcaagggcctgggtgagatgaacccccatgagctgtgggagaccaccatggaccccaccacccggacgctccggcgtatcacgctggatgacgccgtggccgcggacgagacctttaccatcctgatgggcgagaaggtggagccccggaaggaatttatcgagcgcaacgcccaatacgcggtcaatcttgactattgatccgtagggcggctgccctcggccgcccgtccgatcagatatgcctttgcgggccggcgagggcgccggcccctacaaaaaggagatacgatacatgagcaaaaagccccaatacgatcctgaggagatccggtaccccgaacagaagatcgtggagtcaccgctggtccccgagatggagaaatcctacattgagtacgccatgagcgtcatcgtgggccgggctctccctgacgtgcgggatggcctgaagcccgtccatcgccggatcctctacgccatgtacgaggatggcctcacggtggacaaacccttcaaaaagtccgccacctgcgtgggcgacgtgctgggccggtaccatccccacggcgatgccagcgtctatgacgctctggtccgcctggctcaggatttctccatgcgctatcccctggtggacggccacggcaacttcgggtccgtggatggcgatcccccggcggcctaccggtacacggaggcccggatgtcccggctctccgacgagatgctgcgggacattgaaaaggacactgtggactgggaccccaacttcgacgagacccgcaaggagccccgtgtcctgccctcccggtttcccaatctgctggtgaacggctccagcggcatcgcggtgggcatggccaccaatatcccgccccacaacctgcgggaggtgatcggcgcctgcatctgcgtgctggacaatccggaggctcagctcagtgatctgatgcagtacgtcaaggggccggacttccccacccggggcatcatcatgggtcgcagcggcatccggcaggcctatgccaccggccggggccgggtggtgatccgggcccggcatgagtttgaggagttcggcaaggaccgcacgcgcattgtcatcaccgagatcccctaccaggtcaacaagcgtatgctcatcaagagcatggccgaccaggtggaagacaagcgtctggacggcatctccgacatccgggacgagtccgaccgggacggaatgcgcatcgtcatcgagctgaagcgggacgccaatccccaggtggtgctgaaccgcctgttcgcccagacccagctgcagaccagctttgccatcaacatgctggccctggtgaataaccagtctcagcccaagatcctctccctgcgccacatcattgacgagtatctggccttccaggaggaggtcattatccgccgcaccaagtacgacctgcgcaaggcccaggagcgggcccacctgctggagggtctgctggtggctcaggacaacatcgacgaggttatcaaaatcatccgcagcagctacgacaacgccaaggagaacctgatgtcccgcttcggtctggacgatgtccaggcccaggccattctggatatgcggctgaaagcccttcagggcctggaccgggagaagctggaggcggagtacaaggagctggaggaaaagatcgcctacttcaaccagctgctctcctccgacgagctgctgcgcaaggtgctgaaggaggagctccaggccatctccgacaaattcggcgatgaccgggtcacggagatccaggatgtggaggatgagatcgacatcgaggacctgatcgaggaggagcagtgtgtcttcaccctgacccaggcgggctacatcaagcggacacctgccagcgagtacaccgcccagtccaagggcggcatgggcaagaagggcatcaccacccgggaggaggactacgtggtggatgtgtttactgcctccacccacgactatatcctcttcttcaccgacaccggcaaggtctaccggaagaaggggtatcaaatccccgagtccggcaaggctgccaaggggaccaacatcgtcaacatccttcaggtggagcagggcgagcggatccaagccatgatccatacccggtccattgaggacgacggccgcttcctcttcatggttacccggaacggcacggtgaagcgcctgccggccaatactctgaagaatctgcggaataacggcatccgtgccctgcggatggaggagggtgaccagctgatcgctgtccgggagactgacggcagccagaagatcctcatcgccacccatgacggtatggcagtctgctttgacgagaacgatgtgcggcccatgggccgggacgccgtgggtgtgcggggtatccgcctgcgccagggcgattacgtggtgggcgccgcccgtgccaaggtcaatcatgcggtgctggccatcacggaaaacggctacggcaagcagacgccggtggaggactatcggatcaccaaccggggcggcctcggcatcaagaactacatggtgacggacaagaccggccccgtggtgggcatcaaggtggtggacggcacggaggacctgttgttggtgacccaggcaggcatcctgatccgcaccccggtggacagcatccgcaccgcgggccgggccactcagggcgtcatcgtcatgcggttcaaggaggagggggatcacgtgatctccctggcgctcacagaccatgaggagggcagcgccgaggccgaggaataaggccgtccggagccggggcgaaaacgcttctgccggaatgtttatcagaacacagggggagctgttcccgaggagacggctcccccattcaaaaccatcttccaaaaggatttcatgatgaaaacagtcaccatctacaccgacggcgcctgctccggcaatccgggccccggcggctggggcgcgattttgatgtacggcccccacagccgggagctctccggcggagaggccgccaccaccaacaaccgcatggagctcaccgccgtgatccaagcactgtccctgctgaaggagccctgcatcgtggacctctggtccgattccaaatatgtgatcgatgggctggagaagggctgggccaaaggctggaaggctaggggctggaaaaaagctgacaagaagcccgccctgaatccggatctctgggacaggctgctgtccctgacagaggttcattccatccgttaccattgggtcaagggccacgcggagaatgcgtacaacaaccgctgtgatgagctggcggtggcggagagccagaaatacaagtagtatgtcttctgtaccccgcagaacggggcaggcgccgtacaagcggttcgacgacggcaaagccacggcggagtcggaatttcctctcgccgggcaaatcaaaaaaataggtcccccaccggctctgccgggcgagggaccatgcggagagcgcatacagcaaccactgtgatgagctggtggcggccggagatcctgatagcccccgcttccttctcatggggagaaaaagtgagagaaacagacctatcttccaaaaaaagacaagtttttctaaatttttccgctgtttacgaaaacagaaaaaaacattcacaatctgttcataagaaaaacataatttagaaaaaattttcggatatctttataatcaagcaaagggtcctcccaaacccgatgcgttttctccctcctaaaaacacacacagcacaaaggaccgccacatggcggtcctttgtgtgtttacggctggatcagctccttgctgagatggacgatgaagtcctgcacattggtgacgatgccccgggcggagaggcttccccggtcactgagtttgttcacggcaaattctgagatatccacgcagtagaaatacacctgccgcacggttccgtctgccagcacccggtaggagggggtcatgtttccggcggcgatggtgtgaagggcagtggccatgcagatcaccgtggtggcggagcggatctctgcccgcatggcgtcctgagcggcatagacgtctgccagcaccggcggcagaggcccgtcgtcccggatggagcccgccagtatgtacgggacgccgtgccgttcgcaggtgtgcagaatgccgttttcgatctgctccgctttcagaaaggcgggaatcgatccgtggagccgcacccggttgatggtgtccagatggttgtagtgcccgttgggctgactttcctgcgtgtagatgttctgccccagagcagtgttgaggtaggctgcctccagatcatgggtggccagcgcgttgcccgccagcacggcatggacaaagccgcctgcgatgagccgggagaaggcgttgcgtgcgtcgtggtcaaaggcgaaggcgggccccatcacccagactaccttgccgtggtcccgttcgtggcgcagcagttcatagagctcgtcatagtcccgggaaaaggcggtctcccgggagcggccctgccggaaggcaaacacatctctggcaacccggcgctcccggaagccgtccgggtggacgaggatcccctcctctccctgttctgtgcggccgacggccaccagatctccctgccgcaggcggcggaattcccggacgtcgatgcggccccgatcccacacggccacgcagtccatccggctctcccgggccagatgccactgccctgcgattttgaagtattccggaaagatgctcatggcgtggaaattctccggcgccacgccgtcccggggcgccgggcgaaagacggcgtccggtgcgttttccagtgcgggtgtggaaaagaccggcggaaaataggggcgcagctgaaacggcataatggcgttcctcctttgaaagatggtgccgctgttccacccggatgcagagaagaaaagcccggggaccgctcctcgcaatacctgcggagcagtctccaggcccatcggcattcccatccggcaaaagggcgcgggaggtttgattgcattcagaatatcagaatgccgccaaaaaaacaaggccctttcttgtaaatccgggccgtcgggtgtagaatatccaacatacaggtttttccttcaaggaggcttttcaacatgagagacggttttatctccgtggccgcaggcacccccaaaatccgggtggcggactgccgctataacgcggaacaaatttttaccctgatgcgggaggcggacaagcagggggtgaaggtgctggctcttccggaactgtgcctcaccggctacacctgcggagatctgttcctgcaggacacgctgctccggggcgccgaggagggccttcagaccatcctggaggctacaagaaatctggagatcgtgacggcccttggcctgcccgtgtgggacaaatgggacaacaaattgtataactgtgcggctattatacaaaaaggagagattttggggctgattcccaaggtctatctgcccaattatggggagttttatgagcagcggtggtttgcatccggcagcggcgtggagcacgggattgagctgtgcgggcagcatgtgagtctctgtacgaaccagacctttgcctgcgacaccatgcccaacttggtgatcggcgtggagatctgcgaggatctgtgggccccggcgccgccctccgtggagctggcccggaagggcgccaccgtgattctgaacctctccgcatccaatgagctggtgggcaaggcggactaccgccgctccctagtgacaggccagtccgcccggctgatgtgcggttatgtgtacgcggatgccggagagggagagtccaccaccgatgtggtgttcaccggccacaatatgatcgcggaaaacggtaccctgctggcggagcggcggttcgccaccggactcaccgtcagcgagatcgatgtggaccggctgatccatgaccgccgccggaccaacaccttcaccttcggcaaggagccgccggagatctggcggtgcggcttcacgctgccggtggaggagacccggctcacccggtacgtctccccatctcctttcgtgccggaggatgccgcgggccgggcggagcggtgtgaggagatcctgcggatcgcctccctgggtctgaagaagcggctggagcacaccggcgccaagacggcggtggtgggcctctccggcgggctggactccaccctggccctgctgatcacggccctggccatggggatgctgaatcggcccgccagcgacatcgtggccgtcaccatgccctgcttcggcaccactgcccggacgaagtccaacgcggagctgctggcggagcggatgggtgccacgctgaagatcattgacatctcccaggcggtgcggcgacattttaccgacatcggacagaacatggagaaccatgacgtcacctttgaaaacggccaggcccgggagcggacccaggtcctgatggacattgcaaaccagaccggcggcctggtgatcggcacgggagatctcagtgagttggccctgggctggtgcacctacaatggcgaccacatgagcaactacgccgtcaactgctccatccccaagaccctggtgcggcatctggtggcctatctggcccgggacaacgcggagaaggacgaggccctccatgacgtgctggaggatattctggacacccctgtctccccggagctgctgcccgctgtccaaggggagatcagccagcggaccgaggatctggtggggccctatgagctacacgacttcttcctgtactacatgctccgctggggcttcccgccccggaagatctaccgtctggcgctgtatgccctggggaagacctacaccccggatgtgatcctgaagtggctgaagaccttctaccgccgcttcttctctcagcagttcaagcgcagctgtctgccggacggccccaaggtaggttctgcggcactctccccccgcggcgactggcggatgccgagcgatgcttccgcggcactgtggcaggcagaactggagacactggagtaaacggaagagaggagccagttgccgaacatggggggcccaaaaaaatcaaagattttttggggaaagaaggagcaagggagcgtccggagcttttgccgtgggcagaatcggaggggagcggactttgcgacgacgcggcggatgccgagcgatgcttccgcggcactgtggcaggcagaactggagacactggagtcagtgcatttttaacagtatgtggaaagcggaccagggcgacggctatacagccggcgctctggtctttctatgcgtatacagataaacacggacaggcagcatgaactttcgcagttcttgacagattctcccccctcccattaaaatagaagaaaaattgtttgaaaacggaaaggaagcacacgatggaagaatctctagaacatatccgggagagcgcggagacacgaatgaggaagaatgccttcatgctccataattatatcgagctggaacgcgtggaaaaagaccgggcggtcttcaagctggacatccgcccggagagctgcaacccctatgggctgattcatggcggcgccatctacaccctggcggacaacgccaccggcgcggcggcccacagcgacgggcggtattacgtcacacagaccagcgcgctccacttcctgcgcaaccaggccacagggacggtgcgggcctctgcttgggtccggcaccgtggaaagtccacggtgctcaccgctgtggacatcaccggagagggcggcaggctgctggccacgggggagttcaccttcttctgtgtagacaaggcgctgatggaccagaaggcggccgctgagcagaaataagagagatgcgggagagggcgaacccctctcccctttttcccaaacactgtggaaaaccgggctgtcatatctccgcccgccgccgcataaggttgtcccagaggtgaggcgatatgaagaggccggtttttccaggcccgttcagaagagggctccggcggctgggcgcagccgggctggcggccgggaccctttgggcggttgtggtcaccgccggaagcgacagcgcgtctgcagcctgggcggccctgcgggcggcgtctccgctggcggcgctgaaatgggagctgggggacctgtgggcgaacgatgacctctcccccgccgcggtgatgacgttgggagagtctcccctgctgttgtccgcccgggcggctgtggcggagctgtggtccaccgagcggacggaggaatccggtgcggacggccgggaggagactgtcacggagccggtggaggagacgccgctggagaccacgggagagacggacaacggcgttccggccagaacactggtgcctacggaccccagcggctatacggtctgcggccggtcctacatctccaacagcacggaccacgccctcaccgtcacggagctgtcggagccctttgacgcccggctcgccgatggggagcctcagattctgatcctccacacccacggcagcgaggcctacaccccacccccgggcacggacatcgtctggtccggcaactaccgcactacggactcccgctacaacgtggtgggggtgggagacgagatggcggaggtgtttaccgccgccgggatctccgtcctccatgaccggacactgtacgactactcgtcgtacaacgacgcctataacaacgccctggcggccattgagacctatctggcggaatacccctccatccgcttcatcctggatgtccaccgggacgccatcggcgacgcggagggcaatcagtacaaggtgatctcggagatcgacggggtgggcacctccgcccagatgactctggtgatgggcagcgacggcagcggcctggctcatgagcactggatggagaatctgaaactggcggtggcccttcaggacaatatcttgcaaagctatcccaccctgatgcggccgatcctgctgcggaattcccgctataaccagcacgccaccaccggctccttgctggtagaggtaggggccgccggcaactctccggaggaggccgccctggcgggccgcctgttcgcccagcagatggcggactatctcattgatctgggcaagtgacagaggcggtcctgcggagagcaggccatccggccccggtccgacggcaaaagccccgtccgaacggacggggctttttgctttgaaggctcagggctcctccgccagggggaaggacaccacagcggtgaacaagtccgccagcgtctccacgtggaaatctccgccgcaggcctcggtaaaggagctggcgatggaaaggcccaagccgctgccgccatcggtacggctggcgtcgccccggacgaaccgggccgtcaggtccacgcctgtgggcagctcctcccgggaggtgttgcgcaggctggcctccgccctgcccacctcggtctttaaggagaggtagacccggcttcccgccagggcatatttcagggcgttgtcgatgaggttctggaacacccggtacagccgccggccgtcagccgtgatcatcaccggtatctccggcagctccatccggaaggtcagcccgctttgggagataggcccctccaggtccgccagggtctgccgcaggagcttggcaaaatccagccgctccaagtggaccggcagctggccggaggcggccttgctgacctcgaacacatcctggaccatcactgccagccgtcgggccttctcgtcgatgatccgggcgtagtccgctgcggccccctccaggggctcctgccgcagcagttccgcataggagagcacagaggtcaggggcgttttcaggtcgtgggacacgttggagatcagctctaccttcatccgttcgctgcgggtctgctctgccagggcccggtgcaggcccgcctggatgtcgttcagctgctccgcggtctgatgcaggtctgcgtccgccggcaggtccaggggcgtttccagatccccgtcccggatggccgtcacttggtccgccagcaggccgatatcccggaccagggtccagtcccgccggatccagaagatttccaggacccctatcagcgcaaaggcgggaacaaaaacgcagatcacagtcagagaagagttccaaagcatttcatacacagggacacagcagagaacagctgtaagcataatggcccatagtgcaaggttccgcaccagagaccgccgccggagccgcttctgcaccggcagcttcaagtctcttgccaagaatgcgtttttcagccccctcaacagactccgccgctgctccctttccgtgtttttccgggtgatgtgccgcagccacagcgcccacaccagcgccagcagcgccggggcattggcgggcagcagcgccgccagccgcagggcgtccgtcacggtcggacccacccagccgtaataccagaattcaaagggagagtagccgccgaatcctgtggagaacaccatggagaggactgccagggcagccgccagccaccagatctccccgggcacgcggcgagtgagagcggccagctttttctccgccttccgccgttccgcccgcaggagacgggtactcaccagatacgcaatgccgagcacacacagcactgcccgcagcaggtagaacttctgcatcccctggatgcgctgatacaggctgtagagatcgttagcggggcgggacgccccgccgctgttcggctggagataaggcaccggctcctcccggacggccatgtagacggtcacatccgccgcgtcctccccggccgtgaaattctcatagccggggacgtcccacagggaatcctctgtaaaaaatccatcgccgtaaacgtccactggctctccatccttggtgatggtgactgtaccgttctggaaggtcagcagaaagttgtagccctccggcacggcccagctggaggagaggatcatattcgctggagcattgctgtaataggagtcctcccccgatccctggacccggtagaggagattcttgtcctctacataggaggcgtctggcgcctcctctttcggggttgctatatcttctgtggcagtgtccgtggatccccactcgtaccaggtgatgccagcactggacacgacgtaggtatccccggaagcagtatcccaccactccaggtcgctgccagtggccatagccagaaaggcccgcagccgttgggccacctcctgccggaaggctggggtctcctgccagtctgtactccaccatccgctgccgaaggagccgctgtcgaccccgctggccaggcggcccgccgtctgtcccaggctccccagcaccaggctcacgcccagtaccagggccgccagtccggccgccgcccgcagcctgccgcaggtctttccggagacgcggaccttcgccacgcccggggcgtcctccacccccttcagagcctcccggacctccccggccacaagttgttccagaccttcgtcaggtcccgtgctgttccattttgtatccaatgccccacaccaccttgatgtaatctggctccttgggattgagctcgattttttcccgaatgcgccggatgtggaccatcaccgtgttttcgcaggcgtaggccgcctccccgtcccacacccggcggtagatctcctccgccgggaagatgcggccggggttacgcatcagcaggtccacgatctttgtctccgtggcggtgagcttcaccgcttccccatccgcccgcagttcccggcggtccgggtcgtaggtgaggcgcccgttgacgatgaggccctgccgctcctccgcgtggacgtccccagcagggtgtaccgccgcagctggctccggactctggccgccagctcctgggggttgaagggcttggtcacatagtcgtccgcccccatggagaggcccaggatcttgtccgtgtcctcacttttggcggagaggacgatcaccggcaggttccgcttttcccggatccgcagcagagcggacagcccgtccagcttgggcatcatcacgtcgatgaggatcagccgcaccgccgggtccagggccagatccagagcctccatgccgtcataggcccgcaggacccggtagccctcccgctccagggtgatggcgatggcccccacgatctccggatcgtcgtctaccaccagaatgcacgcgttcatctcgatccctccttgagctgattgtagcataccagggaattcttacaaacacccggagaaatttcttacagatttcttacggtttcaagcggcacaaaaaaagggccctcccgggaaggaaagcccttcttttcaatggctcactttttcagcggcatggagaagaggaaccgggtggaggcctggtcgctctcggccttcagagttcccttgtgctccgtcgcaatggaggcggcgatgggcagccccaggccgaagccggactgctccccccgggaggcgtccgcccggtagaatcgctcgaacaggcggcccagctggtccggtgggatgggatcgccggggttggataccagcagacgggcctgccggtctgtgcgccgcagggtcaggctgatggtaccccccgcctgcccatacttgatggcgttgtccagcaggacgccgatcagctggcgcagtttgtcggcgtcgccggtgacggtcacgtcgggggtgatgtcgctctccaggggctttcccgcctcaaaggccaccggctcaaaggccagtacgcagtccgtggccaggtcggagagcgagacctcccccatcaccgccgtgggaaccgcattgtccgcccgggccagggtcagcatctcctccaccagggacttcatctgtccggcctcggagcggatgttgtccgcccaccgggccgggcggtcctccagcggcgccgcctccagcagttccgcattggagaggatcacggtcagcggcgtcttcagctcgtgagaggcgtcggaaaggaactgccgctgctgctgccaggcttttgccaccgggcgggtggcccaccgggccagcaggatggagacgcccagaagcagcagcagcgccgccagaccgatttgcagataggagcccatgatctcctgcaatgtggcctgctccatggacatgtccacaaaggcgatgcgctcgtatagtccatagtcccggcgcagataccgcaggccgtagctgtggatagtgccctcgggccggttctgctggagacagtcggtaagaatggtctgcagctcctgtgtgtcctgcagattggaataggtcccgcctgtgacaaaggcctcgtagattccgctgcggtcccagagattcaccgtgaaatagggcagcagaacgtcttccccgccccggttgagccccagatccggccggccgctgggagtgtcgtcctccatgacccgctggagcacctgatggctgatgacctcgatgttctgcttggcggagaaaaacacagccgtgaataccacgcccagtaccgcggtcaccagaatcatgcacatggccacgaatttgatctgcaattttcggatcatgggaggatcgcccccttcctgtcgaaaactctgtggaaaagtggaaaaatgtggactttgtggaaaactacgcctcctcaggcgcttccaggcagtagcccaccatgcggatcgtacggatcttcacctgggagtggagatggtccagcttcttccgcaggaaggagatgtagacctccacattgttgtcctctgcgtcggactcatagccccagaccttcagcagcagcttctccttggtgatgaccagcttctggttcagcatcagcatctccatcatgtcgaactccttccggctgagccgcacggagcgctcgccgcaggagagggtgaaggaggtcttctccagccgcaggtctccgtatttcagggcatcagtctgccgcagctccggctggcggcgggtcagggcccggatgcaggccagcagctccttgggctcaaagggcttggtgagatagtagtccgcaccggagtccagcccgttcacccggtccgtcagctcggaccgggccgtgagcatcagcaccggcgtggtgctgccctccgcccgcaggcggcgcagcacggtgaagccgtccagcttgggcagcatcacgtccagcaggatcacgtcataaatggaggtcagggcgttgtccagccccgcctcgccgtcgtggcagacgtccaccgtatagccgttcagctccaacaggtcctggagggtggcggccaggcggacctcatcctccaccaccagtacgcgcatgaaatcacctccgtttgcaggatcgcgcgccgtttctgccggcagcgccacacaggggggagcccgggggctccccctggtcagatgagacggatgggaaacgagatcgagtttattcgcccgtggcgtccgccgcagtcaggccattctccgccacagagagaatggtgtccaccgaagcggtgtccatctggtagatggtggaatccccctccatgcggacgtagtagccggtctggtccaggttctcgctgccgaaggtcagggtcagcgtcccctcggtaccggtgtcgttcaggtagagaatggtaaccgtggcctggggtgcgtcaaagccgcacagggcagcggcctcgtctgtgggcttgtagtccacgcatttggtgaaggtcagcgcccccagctccgccagcagagaggcggtgtccgcgttgccggtgacgtcctcgccgctggcagcccaggtgacggtaaccgtttcctccccggtctcctcgtcggtggaggtctccttgtcgatgggccgcaacagggtgctggcggcgccctcaacggtgacggactggaggttttcctccgtcagctggggcagctccggcaggtcgcacatgtcatagatggtcttggacatctcggtgtacagggagttggagatgatatacaccggactctcctgttcgttcatcagcatatagtagctgttgccgtccgtagtggtgttgcccagggagatggtcagcgtcccgccgtccggcttggctgcggtcagggtggcgaagggttggtccaggccataggcctccagcgtatcgccctctgtaatggtctgctggggtttgaggttggtgagaagggtcaggatcgactggatggtggagtcgtccaggggaaactccgggtcgtcggaccagacccacttgcccgcctcgtccagatggaaggacagcgtggcgttgccgttgtcataggtgagggacgaataggcggcctccgtctccgtgatgacgctggcggcgtcctgggcggcggcctcctcagcttcccgctgggcgctggaccgcttgacggcggagaccaccgccagcaggatgcccaggcccaccaggatccccagcaggagaaccagcgtcttcttctgtgttcgattcatgcttgtatgctccttcgtcacagtttccggcggtgcatccagcggacaaagccgtagatcagcagcgccgcggggatcaccaggataaacagcaggccccagatgccgccggtcgtgatggtattggtgggcgtcaacaggctcaccggctccacagagatggcggatacatcgtcaaagcccacagtggcggagtggatgaagagatccacgttgtcaacattggtaaagctgttggtcacatcggtgttgatcagcgtgtccgcgccgtagaccgtcagccgggcggtggtgtcctcgctgatctcctccgtggccacggcacccaccacataggtcccctgggtcatgttgtccgcgtccagcacggcatagccgttctccgtggtggttaggaagggctggacggtgatggtgtcccgggtgggatccgccagggtgaagccccgggaggcataaaacaggaccatggaatcacttgtgaggctgctggccgcatccacagaggtgtccgcctgcgcgaagaacagataggggttgttctgatagccctgggaggtgtccgcgatcatgccgtccgccacctgcattccataggcggcgcacagggcgttgaagttgggcaggtccaccagctcaccggccatgttgtagatcacctggccgccctccgccagatagttcaggatcatatccagctcatcgtccgccagatcctggtccggctcgttgaggatcagcagggagcagtcctcagggatgccgccgtcggtgagcaggttcacccgctccacggacatgtggagccgcgtgaaccgctccttcacgctgatggggacggcggtctcgttgtggcctgtggtctcgtacaccatccgggtcacgccggtgagcacgctgtcgatggcggaggtcagcaggctctccccgtcgaagtccgtctccgtataggtgccgtaatagtaatacgacatcatatcatacccgattatgtcgctgatgtcaaaggactcctgccggccggtggcctcgcaggtgaccacgatggtatccgcccccacaccgtactgggacagggcggagggatagaccgtggggtcggtgtattccagggtcaggtggtcgctgagatctgcgtagatgtccagaaagcggacgatccgggtatccagtgtgtccttgtcggtgagcacgtggatcaccacgtcatcctccagccccgccaggtagtcctgagaggtctcgctgatgttgtagatcccgctgcccgtcaggtcgatctgggcccactgctccggcagctgtgccgccagcaggttgaacaccagcactgccgccacggccagggccgtcagtccggcggagaaggcgcccctgcgggaggcgtggcgccccgcggtctcctgcaggctgtttttccaatcacgatgttccatattcacacgcctcctctcagttccaccggcgcttctggatgacctggacggtcagaaagaccagcagcgcgctgatggacaggtacagcaggatcccgggcacgtcgaagacgtggtccgtggaaaagctgtcgaaggcggagagcagggagaacttgcccagcacatccggcagcaggttggcgaagacggaggagtcccgcaggtagaaggcgatcagcaccgcggcgccggccaccagcacgccggctgtgaccttccagttgttggacagggcgttgatgaggaagcacaccaggatcagcaccacgaagaagcccagcagagacccgacggcggtggagggcagaaagcccaccaggccgtcccacagatacagcaggagcagcaggccgaaggtgcccactgcggcgatgatctggctctccgtcagagaggagatcagcatgcccacggcgatctccaccgcgcccagcaggaagaaggccagaatggcgccgtagtccgccaacaggaaggccgtgccgttcagcgcgatgatgagggggcacaggcaggcaatggccaccggcacggcgaacaccgtcagcatggcgaagtacttccccagcaccacggcggtgacggataccggcgccgtcagcagcagctggtccgtcttggtgtggcgctcatccgccatggagcgcatggtgagaatggggaccaccaccatgaaaatgaagagagaggagcccagagagagggagaaataggggtatccctgaaacaggttgtaggcaaagaaatagatgccgatgaagaccgtcagaaccgccacgaagatccagccgatcatggagttgaaataggagctgacctcccgcttataaatcgctttcatcgccgaccgcctccttttccgcagtttccacagaggtctggaacagcgccgccgcccgggcggccaccgtatcgttatcgtccgtcagatccaggaagacctcctccagagaggccgtccggggccgcagctccagcaggggcagccccgcctctgcaaaggcgaagaacagcgcctcccggatgtccctctccatgtggatggcaaatcgggctgtgtcctccgtccgccccagcagggtccggccggtgatgcccgccacccggtccagcacggcccccgccgcctccggcgcggcctttgccgtcagttccagggagcctccggcggagagcttctcctccaggtcctccggggtgtcgcacaccacaaaccggcccttgcggatgatgaggacccggtcgcataccgcccggatctcagagaggatatgggagctgaggatcacggtgtggtcctttgctagatgccgaatgagatcccggatctccaccacctgcttgggatccaggcccacggtgggctcgtccagaatgataatcttggggaagcccaggatggcctgggccaggccgacccgctggcggtagcccttggacaggttccggatcagccgggcgctcatatcctccagatgggtcagggccaggaccttcgtcagctggtccgtccgctgctccttggggatcttcttcagctccgcgcagaagcgcaggtactcctccaccgtcatatcaggatacagcggcgggatctcggggagatagccgatgcaggcacgggcggcctccggctcctccagaatatcgtggccctccaccaggacctgtccctccgtggccgccagatagccggtcatgatattcattgtggtggattttccggcgccgttcggccccaagaagccgaagatctggccgtcctccaccgtgaagctcagatggttcaccgcatagtggtcgccataacgcttcacaaggtttttgacctcgatcacacaaataacctccttcaggaatggagacgggcagggcccgccccagtcagctttcacagtataaaaaaagaaactgaaaactatctgaaagaatgaacagaacttcataaactgttcaaactttttaaaggttgtttttagattttgggggtatgatacagacatcctccaaaaaggataactgatcccccctctcttttttcatttttcatttcctttctctctgcgtgcggcggagggcgtccatgaccaggcgtcctccgccgcacgctgtcttgcgcgaaaagggcgaaaaagacggaaagatccggccggtccaggactttccgccgacttgttcttgcaaacagccggtgtttccgatataatgattccgcaattctaagtagccgggttcagaatgcgactgcccggtgaacaatggaggaaaaaagaatgagaggcgtacacagcgcggtggatgagatccgccgcaatgtcttcaccgaagtggcccgcctggcctatgagggcggggatttgaagcgggtggacatgatcccctacaccatcgttcccggagaggtggcccgccaccgccacgacgtgtttctggagcgggccattgtccaggagcgggtgcggctggcccttggcatgagcctgcagcccgctggcgagcagacgcccgtcagcgccggtatccaggaggcggccgcggccgacgacaaatattttgaggagcccctggtcaatatcatctcctttgcctgcaatgcctgccccccaagcagatccggattacggacagctgccagggctgcctgtcccatccttgcatgaatgtgtgccccaaggatgccatttatctggacaaggacaagcattgccacattgaccaggacaagtgcatcaaatgcggccggtgcttcaaccagtgcccctaccacgccatcagcaagattgagcgcccctgcgccgcagcctgcggcatggacgccatcgaatccgacgagctgggccgggccaagatcaactacgacaagtgcgtctcctgcggcatgtgcttggtgaactgcccctttgccgccatcgcggacaagagccagatcttccaggtcatcaacgccatgaaccgcggatccaaggtcatcgcctgcgtggcccccgcctttgtgggccagttcggcaaggccgccacgcctgccaagctgaaggccgccatgcggatcctgggctttgacgatgtggtggaggtggccatcggcgcggacctgtgcaccgtggaggaggccaaggatttcctggcggaggtgccggagaagctgcccttcatgggcaccagctgctgccccgcctggtccgtcatggccaagaagctgttcccggagttcaaggactgcatctccatggccctcacccccatggtgatcaccgcccgcatggtgaagaaggaccatccggatgcccggatctgcttcattgggccctgcgcagccaagaagctggaggccaaccggaaatctgtccggtcggatgtggactacgtgctgacctttgaggagctgcagggcatgttcgatgccaagaacatcgacttcaccaccctggaggcggacccggaggacggcctgaacgagggcacctccatgggccgcggcttcgcggtgggcggcggcgtggccgcggccgtggtagaggccatcaagcacatcgaccccacccgggaggtacagatcgagtacggcgacggcctgcgggagtgcaagaagatgctgatgatggccaaggccggaaagcgcaacggctatctgctggagggcatgggctgccccggcggctgcgtggccggcgccggcaccatcacccccgtgcgggagagcaccctgaatgttgagaagttcaagaaggaggccgcggaggtcagcagcaccgccagcccctatgtggaccgtctgaaagacgtggaggaataaccgctaaagcaagaaagcgggccacccaaaagggtggcccgctttgtgcgttttccggaaaagctgtggttctgcttacatttggtacagaagaaccatcagcggcatggtcccgatacagagaagcgtggtgattacattaatggcgccggcgtagtctccttcatgaccgtaaacttgagcgatctgagtgacgttagccgccgcaggggcacttgctgccagcaggctgatcatcaggatggactggccgtccggcaccagggccgcaaggccagagtatttgaaaatacacaggaccaccagcggcagggcgatcagccgcaggaaggccaccttccagatgctgcggatgcgcaggaccgccaacaggttctgctctcccatgagcatgccggcgacaaacatgctgagggggccgatggtggaggcaatggacttcatggtaccggcgatcaccgtaggcaggggcaggttcagcagaaacagcagcacacccacaaacacggaaatgatgttgacattcaggagaatttttttcagcgagacattccggtcaccactcagaataatccggcagtgactccacatgggaaactgctgcaccaactgaaacatgctgcaatagatgacccactccggccccaggaccgcagtcaccagggggatgatgaggttaccggaattggtgtaaatcagggaggcctgttccaccggcgtcagacgcagggggcggtgcagtaaggccgtggcaatgaaaaacagagcgtggatgccaatggcggccccaagggagagggccagaccctgaagcagctccggcgtacgctggagctggaaggcgttgatgatgacgcagggagtgaccagatacagacagactttggacagaacccggctgtcctccggcttcagcagatgcaggcggaccaggagccagcccaggacgatacacagaaaaagctgtacgatctgttcaagcagcatcaataccatgaaaacgttcctccatctacacacaggtgcgagtttaatcgtaccacgccaaaagaggaaaaacaaccagaaagtttatatagcgtaaaaaaactgggactgcagtaaaaaggctcccccatccagcggatgggggagcctttgttcagtcacggtctgcctcagtcggtgacgtagggcagcagggcgatctgccgggcgcgcttgatggcctcggtcagctgacgctgatgcatggcgcaggtgccggtggtccggcggggcaggatcttggaacgctcagagacaaagcggcgcagcttggcggcgtctttgtaatcgatatactcgcatttgtccgcgcagaactggcagaccttgcggcgcttgccgcggttggggcgagcgggtctcgcttcacgatcaaaagccatgaaatggttcctcctttatcaaaagtcagaacggcagttcgccgtcctcttcgccgatctcggcgaaatcggattgtccgcccatcggtgcggcgttgcggccgcccatgggggcgctgtaagaagcgggtgcgccgccgaaatcgccggcgccgtcccgtttggaatccccgaagtagacattgtcggcgacgatctcggcgcttctgcgcttgccgccgtccttgtccgtccaatcgcggatctgcagccggccctccaccacggccatgcggcccttggtgaagtatttgctgacaaactccgcggtgctgcgccaggccaccacgtcgataaaatcggtctccttttcgccgctctgggacttaaagtcccggtccacagccagggagaaggacgtgacggcggtgccgcttccggtgcggcgcagctcggggtcccgggtcagacgacccatgatgatgatcttgttgagcatatcaatgcccccttactcgcccttgcagacgatcagggaacgcatgatgccgtccgtgatccgcagaacacggtccagctccttcgggaaagaaggctcgctggtgaaggtcatcaggacgtaataaccctcggtcttgtagttgatgggataagccagcttgcggctgccccactcttccacttccacagcggaaccattctgctcagccagggtcttgaacttggccaccagcgcggcggtgttctcctcaccctgtgcagggtcgatgatatacacgacctcataattggcagaaacctttgccatatttgcacctccttctggacaaatggcccccattcgggatgggagcaaggatatgcctgcagactgcaagccatattattatatcggaatttctggaaatgtcaaggaatttttctcccggctctataggggggcaaatctttacacaagatactgcttgacaaattcccgcgggcggtgtcataataaatgcgacaaaaacaggggagccctcacgggctgagaggaagcggaccgcttcgaccctttacctgatgtgggtaatgccaccgtaggaagttatgtatgagcatccggcacggcgggcaccctctcaggcgcccgctgttttttactttgagacggaagggatgtgcatcggcgaaaacaacatccggcgccccggggaccaccgggagcgggctgagggggagcgccctgggcctgggccggcaaaacagcgatgggaagccgtgttccggcgtgagaggaggccagaaagcctcgaccgattttccacagcaggcggatgcccgcctgccgaccttgcatggcaaggggaaaacgctgtttcgcacgctgttttctccctgcaaattctgatggatcaaaggagcgatctctatgaaaaccaattccaagaagctggccctggcaggcgtgctgtgcgccgtggccgtggtgggcagtatgcttcagtttcccgtattcggcagccagtgcgcgccagtgcagcacatggtcaatgtcatctgcgccgtgttcctgggcccgggctacggcgtggccgtggccttcctggccagcctgctgcgcaacatcttcggcttaggcagcctcctggccttcccaggcagtatgtgcggcgccctgctgtgcggcctggtctactggaagaccaggaatctgcccgcgaccctggcgggcgaggtgttcggcaccggcatcatcggcggcctgctgtcctatcctgtggcggtggcctttatgggcgtagtggccggctccatcgccttttacgcctatgtggtgcccttcctggtctccaccgtgggcggctccattctggccggcatcctggtattcaccctccagaagagcggcgccctcaaatccatgcgggccgcattggagcattgatcccaactgagaaagggtccttccatgcttgatttcacccgtctggacaaagtccgccgccagcggcccctgatccactgcgtcagcaatatcgtcaccgccaacgactgcgccaatctggccctggccgttggcgccagtcccatgatggcccaggcaccggaagagatggaagccatctccgccgtcagcgacgccacggtgctgaacaccggcaccccggatgcggagaaattccgggcctgccggatctgcgccgtctccgcccgtcatccggtggtgctagacccggtaggggtgggcgcaagtccctggcggctgggacaggtccgggcgctgctggacctgttcaccccgtccatcctgcgagtgaatctgggggaggcccgggccctgctggggtcggatgggcaggaacaaggggtggacagcccgctgcccgccagccgggaagcccggagggacaccgccatggacctggcccggcgccgcggaacggcggtgctgctctccggtccggaggatctcatcaccgatggggcgcgggtctggtgcgtcaccggcggcagcggccggatgtctctcgtcaccggcacgggctgtatgctgtcggtgctgtgcggtgtgttcgccgccgtggagccggacgccgccgcggcggctgccctggcctccgccttctggaagatctgcgcccgccgggcggagcacctggccgcagaccggggcagcggcagtttccgcacggcgctgctggacgccgccaatacgctgacggcatctgacgccgcccgcgaggcggagatcctgactctctgacaaagaagcccgcccggtcctgacggaccggacgggccttctgttttgcgaggcaggcgatcactccagctcccgggtctcaaacatctcctcaaaggaacggatatagtagtccgccagcccgcggatctcctcctggtgtgcctcctcggacgcgtcgtacaccgccgccacccggaacccggcggccttggcggtctggatggcgtggaaggcgtcctcaaacaccaccgtgtccttcttgttggactgaaggcggcgcatagcccgctcgtagatctcggcgctctcctttttgccgacccccacctccgccacagtgataagtccccggaagtagtggtcgatccctgcatggcggagggctgcttccgccagagggcggtccgtggcagtggccacatacatccacacgccctccatcttcagaagggacagaaacttgtccacgccgggctttgcctggacctcatgctgatagaaatccgcgacccggtccactacccggccgatcagctcctcctccgtctgggggaggtggtagtgctccttgcagtaggcgatcccgtgccggagggagagggtcttcagcatctcgtcggtctccggctcgggctcgatgccaaggccccgcaggacgctggtacccaggtcccgccagataggcatggagtccagcagggtgccgtccatatcaaaaatcgcgctttgcagtctcatgggaactcctttcgtctgttgccgatggtccctattgtaccaccggagcaggcaaaagcgcaatgaaaaccccgtgaaaaggaggaaaaattcatgcgtctctttctggccatccagctgtcccccgcggtgcgggaagcactgctgaccgctcaggacgccctgcgccgccagggcaggggctctttcccgccgccggagaacctgcacctgaccctggccttcctgggggaggcagaggacccggccagggcccgggccgccctgtcggaggtatcctgccgacctttctccttggcggtgggcggcccgccggggcatttcggcgacctgtggtgggccggtgttcgagcagatccggccctggaggagctggccgtgtccctgcaggcggacctccgctcccggggcttctgccaggaggaccgcccctggctgccccacatcaccctggtccgccgctggcggggcgaggtcccgcaggtgaccgtcccccacgcgagcatggtggtccggcagatctccctcctgcggtcagaccagattgacggcaaacggatctacacagaactctcccacaaatccctgcgttaaaaaacagccggcaccgttaggtgccggctgtttttgcagcggaaaggggtctaggggaaaacctaaggttttccccagttcgttcgccgttggcgaacgaagaaatttcaatcattttcgccgcggcgtgtacgtggcaaaaatcccttgacccgtgcgccctgggcgcacacaccagtccgcagactggtggtggggaggtcgaggggaaacagccgaaatgccgccagcggcggaaaaagtgagtctgtttcgaggcagcggcgcgattggcggcccgaacagggccgggaattgcaatgccgcaacggtgtcagcctgctccccctcgaagccctcagcacagcttcgcgcccgccgggatggaatcatccaccatgatgaggtgcaggcactcctcaccgtgctcggtgtggacggcggagatcagcatgccgttgctctccaggcccatcatcttccggggcggcaggttcacaatggcgatcagggtcttgcccaccagatcctccggctcataccacttgtggatgccggagaggatctgccggtccacaccggtgccgtcatccagagtgaatctcagcagcttctcactcttcttcacggcatcgcaggccttcaccttcaccgcccggaaatcggacttgcagaaggtgtcaaaatccaccttctccgtcagctggggctccacctcgacggcgggcagggcggcctttttggccgcagcctccgcggcctccagctcctccagggccttgtccatgtccagccgggggaacaggttctcgcccttggtgacggcagcggtctcaggcagagcgccccactccgccgcggcgtcccaggtccgactctccgcaggggcgccgatctgggcaaagagcttttcacagctctccggcatgaagggcgtcagtaggatgccgcagatgcgggtggcctccagcaggttgtacagcacatgggccagccgcttgccgttggtctccatatcctttgccagggcccagggggcgttctcgtcgatatacttgttggcccgctggatgaccttgaagatctcgtccagagccttgtggggggcgaaggtctccatgtcctcctcatagtcgaaccggagccccgcggccttgctcactaggtccaggtcaaagaggaccggatcgttgggatcgtcagatccgaagcacatcgtggatgcccggcttgcggcagacctggcggtctctttctccatctccgtggcgccgcacccggcaggcagcgctccgccaaagtacttgcccaccatggcggtggtgcgggagaccaggttgcccaggtcgttggccaggtcggtgttgatggtctggatcagcagttcgttggagaagttgccgtcggagccgaaggggaacgtccgcatcaggaagaaccgcagggcgtccacgccgaacttctccgccaggatatacgggtccaccacgttgcccttggacttggacatcttgccgccgtccagcagcagccagccgtggccgaacacgtgcttgggcaccggctcgcccaggctcatcagcatggcgggccagatgatggagtggaaccggacgatctccttgcccacgatgttgacgccgggccaccagcccttgtcgtagtcgtggtagcggtcgttgtcatagcccagggcggtgatatagttgctgagggcgtccacccacacatagactacgtgcttgggatcgaagtccaccggaatgccccaggagaagctggtgcgggagacgcacagatcctccaggccggggtccaggaagttcttcaccatctcgtggacgcggctacggggctggaggaagtcggtgttctccagcagatcccggacctggtcggcgtacttgctcaggcggaaaaagtaggcctcctcctccgcgtcctgcacctcccggccgcagtcggggcacttgccgtccaccagctggctctcggtccagaaggactcgcagggggtgcagtatttgcccttgtaggtgcccttgtagatgtcgcccttgtcgtacatcttcttgaaaatcttctggacgctctccacatggtagtcgtcggtggtgcggatgaaccggtcgttggagatgttcatcagcttccacaggtccttcacgccccggtctccctctacgatgttgtccacgaactccttgggagtgacgccggcctccctggccttggtctcgatcttctggccgtgctcgtccgtgccggtgaggaacatgacgtcctcgccccgcaggcggtgataccgggccagcgtgtccgtggccaccgtacagtaggtgtggccgatgtggagcttgtccgagggatagtagatgggcgttgtgatatagaattttttcttttccatgggattctctcctttaaaacggcagctccgaatggaagagcgccggtatttgcctgaattattattatagtttgaaaatccaaaaaatacaagggaagatgcgaaaaacgggccgtcacacaagccgcctctcctcgtggggattgtatttttcgcaaaattccgatacaataggaacgctgtatgattttcacaagggaggatgcgcccatgaaactggtatcctggaacgtcaacggcctgcgggcctgcctgggcaagggatttctggacttctgtgccgtggccgacgcggacatcatctgcctgcaggagacgaagatgcgcccggagcaggcagaatttgatctgcccggctatcaccgctactggaacagcgccgacaaggcgggctattccggcaccgcggtgttcacccggcgccagccgctctccgtgacctatgacttcggtatcgatgagcaccgccacgaggggcgggtcatcacggcggagtacccggacttctacctggtgtgctgctacactccaaactccaaggatcagttggcccggctggactaccgcatggcctgggaggacgacatccgggactacctgctggatctggacgccaaaaagcctgtggtgtactgcggggacctgaacgtggcccaccaggagatcgatatcaaaaatcccggtcccaaccgccgcaaccccggctttaccgacgaggagcgggagaagatgacgaagctcctctccagcggctttgtggacacgttccggtatctgtacccggacaagaccggggcctactcctggtggagctaccgcttcaatgcccggaagaacaacgccgggtggcggatcgactacttcatcgtgtcggagcggctgaaggacaaaatccggaacgccgatatttggagcgaggtgctgggcagcgaccactgcccggtggtactggatctggatgtataaacttcacgcgcgttcgatgcgccacgaacatcggcaaatcctgcacatgaagtctttttgcatcatttccggctgccctgaagagtgcggggaaacggcacatttcaaaggtttgtgatgctttgcatcggaaaacaggaccggacctgctgggtccggtcctgtttcagctcaacagggcgttcatctcctcgatctccagatcctggagggcccagttgatgccgtagcccaccaccttgctcagatcccgcacctgctggtcgatgtcccgggtagtgaccatgaaggcatcatgctccccgcgcagccgttcctcatccaccttttccacgccggactcctccagaatgtccgccgccagggtggcggagtccaccaccgtgggcacgccgatggcgaacaccggcacccccagcgtctcccggttcagcgccgcccggtggttgcccacgccggagccggggatgatccccgtgtcgctgagctgcaccgtggcgcacacccgcccgcaccggcgggaggccagggcgtcgatggccaggaccatggcgggctggacttccgccaccaggccccgcaccgcctccgcggactccacgccggtggtgcccagcacgccggtgcggaaggccgacaccggccggaacccggcaaactgcttcggcatggcggagagcaggtgccgggtgatcagcacgctgtccaatgccagggggccaacggcgtccggcgtcatggctgcgttgcccaggcccaccaccagggcggagccctccaccggcagcagggccttcagctccgtgcccacggcccggaccgcccgctcgaaaaagtccgccttccgctgccagaaggtggtgaggtcaatggtgaaatagctgccctggggcttgcccagggcctcctcgccccggtggtccaggatgtccacccgggtgactgggtatccctccagcttgctcttggtcgccttcacccccatgaggcgggtggtccgctccgcggactcctgccagagctcccgggcctccagggccaggtcggtacgttttatgaacaatgcgaaccgcctcccaaacacaaaatctagtggtctgctcactaggttttgcggtaggcggcacgatatacaattttagcccgaaaaatataaaaaaaggcttgctttttgcgccgttccctgttaaaatatcattctgcatggtgggaactggttcccacagtcaaattttctgcctaaggaggtgtttggtttgccgaatatcaagtctgccaagaagcgcgttctgatcgccgaagtgcgcaacgcccgcaacaaggccgcgaagtccgaactgaagaccgccatcaagaagttcgaggctgctgccgcagaaggcaatcgcaccgaggccgatggcgcgtacaaggttgcagtgaagaaagtcgatcaggctgttgccaagggcattctgcacaagaatacggccgctcatcgcaagagcgccatgaccctgaagctcaacaagatcggctgatcatatcgggccaaaaggacatccgttcggatgtccttttttgttttctggccagggggcttttcccgattctggcccttttcttttccgcagggcgtgttataatcgtccgtaggatcagaattccgctgaagaggtgactgccatgccgctgttcgacacccacgcccactacaacgacgacgcctttgaccagaaccggaaggggctgctggacgccctgccggacgccggagtgggggctgtggtgatccccggggtggacgtggagagctcccgctccgccctggccctggcggagagccgcccctggctgttcgccgccgcaggcatccatccggaggactgcgccggctgcacggccgcggatttttccgccatccgggacctgtgccgggagaaaaaagtggtcgccatcggagagatcggcttggactactactgggcggagaatccgccaaaggaattccagcagatggtgttccgccgccagctggagctggcgctggagctggagctgccggtgatcgtccacgaccgggaggcccacggagacagcctggagatcgtaaaggagttccccggggtgcggggcgtattccactgcttctccggcagtcccgaaatggcggaggagctgctgaagcggggctggtatctgggctttgacggtccggtgacctacaaaaacgctcgccgggcgccggaggtcgtggccgtcacgcccctggaccggatcgtggtggagacggacgcgccctacatgagcccggtgcccaaccggggcaggcggaacgacagccggaatctcccctacattgtggaaaaactggcggagtggaagggcatctccccggaggagatggcggcgcacacctggaacaatggcctgcggctgtttgggctggaggggaaggtatgaaaaaagcgtttctgatggtcctggcctgcctgttgctggcgggctgcggcgcgccgtcagagacagtgacgccaacggactcctggccggattccgctctggcggaaaccaatgaagcggctgctgaatccccgccggagcctatttcaaccgcgcctgccgaatccccgccggcaaccgccccggcggaacccctctccgcccccgccgtggtaacggcggggcaggcgccggaggaaccctatgatttgcccacggaggtgatcgggctgaaggactggatcggtgaaagccgctggaaccatgacccggtgggccttttggcagaactgccggagcgggagctctccctctacggcgtgacaaagtggcttgacagctcagccctgctgcgctggggtgacagtctggcggagttttcctggtccttcggcggcccgttgattgtggagccgcagctttggtgctgggatgtggactccgacgggcaggaggaggtcgttgtcatcaatcatgtggacagcggcaccgggacttctattgaggagcttcacgtggtcaaaaaagacggggacggcaccttgacggactactgctttccggagtcactgtggcaggaggacctctccggcctgctgtcggtggtgtcggacggggaccggacctacaccgtcttgggcgcggatctggtggacctcacagacgagatccagacacagtttccggacctcaatccggccatgatcgaggacacctctaccggaagatgggccaatttttccgtgcaatccggtacggatgggaacggcagcgatcttttctttacgggttctgcgatgttggaggggagggaaatcccctatgactggtatgcggcggagattaccgctgccatctcctatgaaaacggcatcttcacgctgtcggactttcatctgaacagcttatcctgattacgcaaggagcgatatttatggaaaagggctttaccatcacctatgaatacggggacaacctgtatgtgaaccccaccaaccggtgcaacttcaactgcgcgttctgcctgcggcacaaccagggttccggcggcagcatctacacccataacctgtggctaaagcgggagcccacgaaggaggagatcctttcctccatcgagagccacgacctctcccaatacaagcagctggtgttcgtgggcttcggtgagcctacctaccggttcgatgacatctgctgggtcatcgaccagatgaaggcccacggcaccaagatcttcacccggatggacaccaacggcaccggttccctcatcaacggccgggacatcgccccggagttcgcgggccggttcgatatggtgtctgtctccctgaacaccgacacggcggagaagtacaacgccctgtgccacccccagcaggaaaacgcctaccaggccatgaaggacttcacgagagaggtcctcaagtatgtgcccaccgtgatgatgaccgtggtggacaccatcccgaaagaggagatcgagaactgccggaagatctgcgaggaggagatcggcgccacctaccgggtgcgggagtacattgcggactgacaaatgcagatatgaagagacgcccgcaggggcgtctctttttcctgagcttatgtatggaataccacggacttcacgatgatgctgacgccgcccaggaggaagaggacgatggcgcccttttggagcttttcctcttccagccggggccccagccacgccgccaggcccatggccagcaccgccgcgggaacagacgccagggcgaacagcagcaccgggccggtgaacaggtcggtgactagataagtcactacccgcaccgcattctccccaaagaagagaaagcacatgctccccttgaactcgctgtaatctctggctgttcgctggaggtaggccacgatgaacatgttgatgccgaagaggcccgcgcacacgccggagaacgcggacaccgccagccgcagccagggccggtccttccggtccggcttcaccggccgcagggagcgggtggccatctccagccctaaaagcaccacgacgacgcccagcacggttttgatgacccagggcatggaaaagcgcagcagcagcgtgccggggatcacgccgcagaagttggccgccagcaacggcaggatcttccgccactggaagctgtgccggtttttccaggtgatccaggcgttcaccgggcagtccagcagcagcgtacccggggtgatgaccacattgtccaggcccatggacaaaatcggcgcggagatcagggggttgccgaagccgatcagccctttgaccagataggccagcagctgcgcggcaaagataaacagtgcggttgaaagcgtcattgtatgttccctcccagattttcacccctcattatataccacattttcagcggaaaggaaacggcattctgcctccggcggaaaaaatggactccctgttccaggtttgtgtcggtagaggcatccccggcaaatcgataaacgatttgccggggaattccaataagtgcagatttaaatataaagataccatatcgtcatgattgcaaaatccgcaaacatatggataacccatgaatgatagatattttcatttttgctatctacatagtcaaaaagcagcccgccaatcgccaatcctattaaagccaaaagcaacatcaacggcggaaatgacattccaatcattgcaatatgataaactgcaaacatgcctgaactgaatatatatgctatttttcgggctgtgtatttggataatctgataaatgcaacgaaacgaaagaaaaattcctccagaaaggaattgcaaaaggaaatatagagagccaccccaataaagctgccgctgttgactttttgatccgctgaaagcgactgaaccaacgacgcatagtcgaagaagttttttgtcaaagtatacgcacccagaatcaccgcatagataaaagagcccagcacaaataatttcatcatgcccctcttgtcgattttaaagaattcatccagtaattttgtatgggttatttttgcatataccaatggcaataataaaaataccgcgactttaagcgcggatttgacaatatatgccggttcaatgattgtttcaatgagtgccataaaaacacaacatattataacaagaacaataatacccgacgctttttctttattcatagccatcagtattatctgcctcccaaatataaatctgctgcttttatattgcctatgtctcatttttaccattatagaatagaaaaaagttttgcgcaaggcagcaggtgaattcgccggggttgtgcgctatcattccactatctagagccggagcccagcaggcggttttgcttgcatttcccgggaaaaaggcgtatgataagaggcgagaaaatggggagcccgctggcgcgggctgagaggaggccagccaggtcttgaccctttacctgatgtggatcatgccaacgtagggaaatcatgaggcgcacagccgcggacgaccgttcttggtatgtccgcggtttttttgacagagaggatggagtgatatgaagatcgaccccaagcggctgcggctgtatgccgtgacggaccgggcctggactcatgacgcggagggcctgctccgtcaggtggcggcagccgtcgacggcggggcgggcatcgtccagctgcgggaaaagcacatgggacaggcggatttcctggcggaggcggagcggttcgtggccctgtgccgggaaaagggcgctgtcagcatcatcaacgacaatgtggagatcgccgcccagaccggggcggacggcgttcatgtgggccaggaggatctggaggcgggccggactagggagctgctggggccggacaagctgatcggcgtttccgcccactccgtggaagaggccctggccgcccaggcggcgggggcggactacctgggcgtgggcgcggctttcgtcaccggcaccaagacggacgccaagcccatctcccgggagaccatccgggccatcacggcggcggtggacatcccggtggtggccatcggcggcatcagccatgacaatattctggagttgaagaactgcggcctggacggcgtggcggtggtctccgccctgttcgcccaagccgacgtgaaggcggcggcggaggagctgctgcggctctcggaggagatcgcccgatgaacatccggggcgccatctttgacctggacgggaccctgacggactccatgtacatctggcagaaggccccggtggatctgatgcgccggtacggcggtgacccgccggaggatctggcccgggacctgaaggagatgggccgccgggaggcggcggagtacctgcgaagccgcttctccctctccaccacgccggaggagctgatggacaccctcaacgatctggtgacggaggagtaccggtcccgggtgcccttgaagcccggggcggaccggctgctggcccggctggcggattccggcatctcctgctgcatcgccaccgccagcgaggcgttccaggcccgctccgccatggaacggctgggactgtggccgcacttccgcttcgccgtcagctgtgtccagtacggcggcaagacccggccggacatctatctggaggccgcccgccgtctggggaccgctccggcggagacggtggtgtttgaggatgcccttcacgctgccaggaccgcccacgaggcaggcttccgggtctgcggcgtctgggacgcctctgccgaagaggatcaggccgcgctgaaagccctggcggattggtacgtgcgggacctgggcgactgggtcccgtaagggacggggaaccgcggccagcgggccgcttccagcggcggatcgggggcaccaccttccgccgcttgataaaacttcaatgcaaagaagcatcaggaaaggaagcatcgatatgaagacagcattgacgatcgctgggaccgatcccagcggaggcgccggtatccaggcagatatcaagaccatgaccgccaacggcgtgttcgccacctgtgcggtgacggctctggtggcccagaacactaccggcgtcaagagcatcgtggagtgtacgccggactttctggcggaggagctggactgcgtgttcacagatatcttccccgacgcggtgaagaccggcatggtctccagcattccgctgatccgggtgatcgcggccaagctgaaggagtatggggccaaaaatctggtggtggacccggtgatggtggccacctccggggaccggctcatcacggaggacgcggtctccgccctgaaggagctcctgctgcccctggccacggtactgacccccaacatccctgaggcggagatcctctccggcatgacgatccgcagcgccgcagacatggaggcggcggcccgggccatcagcgagcagtacggctgcgccgtgctgtgcaagggcggccaccagatcaacgacgccgatgacctgctgtggcgctgcggcagcggcaagtggttccacggaaagcggatcaacaaccccaacacccacggcaccggctgcaccctgtctagcgccatcgcctccaatctggcgaagggctttgacctggacacggcggtggagcgggccaaggcttacatctccggcgctctgggggccatgctggacttgggacgcggttccggccccatgaatcacatgttcgacctgaagagcatctactgtacggaaaaggcagattgaccagtttgcagacaacagggggacagcggttttatccgctgtcctcctgttgtttttgcgcagaaaaacggcggttccgatggcgggatctatttggaatcaccagactgaacaaaatgatttcaggtatttttaaggtttaaaacgagctaaatatactgcaaaaataataaaaacaaaattttttaaagtattttttcaggttgattttagctttccatgatacctttggaccagaacccttcccggagggggaggtacggaaaggattggcacggtatgagcgaaaaaggactggagcgggagacggaaggaatctccgtgggggagcgggagcccgtcgtagcagattcctctcccaaagggggccgtctccgcagcagctggaaaaagctgtggaaggggcggaaacgaaaggcgctggcgctgcttctggtggtggccattgcaggcggcgtggtgatctggaggggccgcggacagacggcctccgctgcgacgacgtatcaggaggcggcggtggagcgccgctctatcactaattccctctcctccagcggcacgctggagccagcggactcctacaccgtcaatacgctggtctccggcgagatcctcagcgatacctttgaaaagggcgaccaggtggaggagggccagctgctctatactattgattcctccaacgcggccagcagccagacccaggcgcagaacagctactcccaggcccagacctcctatgagcaggcggtgaaggccaagtatccccaggcggacctgagcggcaccgtcagcgaggtgtatgtgaacgagggggacagcgtcagcgcaggcacacagcttctgaagatcgtggcggatgagaacatctacatcgacttctacttcacctacgcggacagcggcgacttctacatcggccagaccgccacggtctttatcgacggctttgccgggaccctcaccggaacggttgccgcggtgtccagttcctccgcggcggtctccaccggcgtacccctgactaccgtccgggtacggctcgccaacccgggccttgtgacatccgactacaccgccagcgccgtcatcggcagctactccagctacggccaggcgtccatcaaggtgggggccagcagcgtcatcacggcagaggcgtccggcaaagttgcaggtttcaactggctggtgggcgataccatctccagcggcgaccggatctgcaccatcaccggtgacagcgtggacaaccagattgaaagcgcccgcatcagtgtcagcaacgcctccaccagcctggaaaatgcccgggacaatctggaggactactccgtcactgcgcccatctccggcaccgtggtcaccaagaacgccaaggcgggggacaacattgagggcggctccggcagcaccctctgcgtcatctatgacctgagttatctggagatgaccatgtccatcgacgagttggacatcagctctgtggaggtgggccaggaggtccggatcaccgccgatgccgtggaggggaagacctacaccggcgtggtgacggaggtgtccgtggcgggcaccacctccggcggcatcaccacgtaccccgtcaccgtccgcatcgacgagaccgacggcctgctgcctgggatgaatgtggacgcggagatcgtgatctcctcggcggatgacgtgctggccatcccaagcgccgccgtgagccgcggggacatggtgctggtcaccgcgaattctcccagtgctgtgaatgccctggaccaggaggccccggagggctacgtctacgtgccggtggaaaccggcgtcagcgacaacagctacattgaggtcctctccggcctccaggagggggacacagtggcctatctccaggcggctggctccgccagctccggcgatatgacgttcgtcatgccgagcggggccatgtcctccataccgatgggcgacatgcccagcgggatgccctccggcggcggaatgcccagcggcgggccgggaggcttctgatgggcactttgatcgaatttcgggaggtctgcaagtattaccagatgggcgacaccactgtgaaggcggcggaccacatctccttccagatccggaagggggagttcgtggccatcgtgggccagtccggctccggcaagtccacctgtatgaacatcatcggctgcctggacgtgcccacctccggcacgtacctgctggacggcagggatgtgggtcagatggataaggaccagctggccgccatccggaacaagatgctgggcttcatcttccagcagtacaacctgctgcccaagctgacgctccaggagaacgtggaggtgccgctgatgtacgccggcatccccaagccggagcggcacgagcgatcccggatcgcgctggagatggtgggtcttggcgacaagctgcgcaataagcccagccagctctccggcggccagcagcagcgggcgtccattgcccgggctctggcaggggacccggcggtgatcctggccgacgagcccaccggcgccctggactcccacaccgggcgggaggtgctgaccatgctgcagcagctccatgccgcgggcaacacggtggtgctcatcacccacgacaactccatcgctgtccaggcccagcggatcatccggctggaggacggccacgtgatctacgacggcgatgccggtgcgcctgaggcggtagtgacgcccaaccttgccggaagggggatggcgggatgagcttgatcgagaccttccagatggcggtgcagaatattctcagcagcaagatgcggaccttcctcactatgctgggcatcatcatcggcgtgtgcgcggtcatcgtcatcgtgggcctgggcaacgggatgcagggctatattgaggacagctttgccgacatgggcaccgactctctgacagtgatggtgatgggccgcggctcctcccgcagcgtgtcggagggcgagatgtaccagctggtggcggacaacagcgatgtgttcaagcagatctcccccacggtcaccatgagcggctcggtgaagatcggcagcagcactctttccgccacctccgtcaccggcgtcagcgaggattacttctccatgaaggggtatgaggtcgcccagggccgggggctccagtacacggacatgaccggccggaaaaaggtctgcatcgtcgggcagtatctgaatcaggtctattacggcgggaatgccgtgggtcagacgctgcggatcaatggcaactcgtttaccatcgtaggtgttatgggaatggagggcacagagctggaagagggcggcacggacgactgcgtgttcctcccctactccaccgccgcccgcctcagcttcaccggcaccatctccagttacaccatcactgtccaggacacggaccagatctcccaggccaaaaccaccctggagaacgccctctatgagatttttgaggacgacgatgcctataccgtgggcagcatggcggagatggtggaggagatgaactccatggtgaacatggtgatctacattctggcgggcatcgctgccatctctctggtggtgggcggcatcggcatcatgaacatcatgctggtgtcggttacggagcggaccagagagatcggcatccgcaaggcgcttggggcccgggagggcgccatcatgcgccagttcgtcatcgaggcggctaccacctcctctctgggcggcgtactggggatcgccctgggcttcggcctatccgcggcggccacggtggtcatcgccaatgtcatgccggacacccccatcaccgtcagccccagcattgcggcgatcctggtggccttcggtgtctccgcgggcatcggcatcgccttcggatacctccccgccaaaaaggccgcggtgctgaaccccatcgatgcgctgcggtatgattgagacgccatccgcatccgcccttcccggcggcgggtccccatccggggacccgccgccgtttttcttgtcagtcgggcccggccgtggtacaatggccgcgaaacaaccggtcttccggccggagagaggttctgcgaaaagaggagactgccatgagggagatcagaaagaagcgtgcggtggctgtggaagtccgccgggagaggaagtggttgatgcagtaaaaaggaaacaggaggagacatcatgaatcagaccatccgcggcatggggcttccggaccccgacgcggtttttccaaacgaatacggcacatcctgctatatcaaaaatgtggtgacggccccgaacatccagatcggggattacacctactacgacgatccggtggaccctgcggggtttgaacagaacaacgtcctgttcaactatccggagttcggggaccggctcattatcggcaagttctgctccatcgccgccgggacccagttcatcatgggcccggccaaccaccggaccagcagcgtcagcacctaccccttccaggtgttcggcggggcatgggctgaccaagcgccgcctcacctgggccagttgccccgaaagggggacatcatggtgggcaacgacgtgtggatcggccgggagagcgtgatcctgccgggggtccacatcggcgacggcgccatcattgcggcccgctccgtagtggcgaaggatgtgcccgcctataccgtggcgggcggcaatccggtccgcgtgctgaagcagcggttcccagaggatctggtccagttgctcctggcatggcggtggtgggacctgcccccggcggagttggcggaggccgtgccgctgctgtgcgacccggatctggacgcggtgcggacggacctgcgccgtcgcctgggaatggcggagtgagtggctgtatgcaaaaaagtcccggccctttttagggccgggacttctgcttttttatgaagcgccgtctttcttgggctcgatcagataagacggcaggctccgctggcagccgtttttctcataaaacgcttccgccccggctgggcgccgaaatacagcagcgtgggggtatgggccgcagccagccgcagcagccggcttccgatgccctgccgctgatatgccggcaacaccagcagctccgtgatggtgccgaaaaagcagccgtctgtgaggactcgcaggcagcccgccagctggccgccgtcccaggcagtgaagttcatcgtttttgacagcgcggcgcgggtctgctccagattgtacgctcccggccagacctgctggacaaagtcgaggaaggtctctccggaaaggctccggtcgtccacacgatactccatggcagcatcctccaatcccgtcacgcctccgccatctcccgcatcagggcgatctcccgggcatagccgggcaggtcgttgggggtctccagacagaagggaagatccttcagcgccgggtggcggacgatccgccccagcgcctccagaccgatggtcccctcccccagacaggcgtggcggtccttgcggctgccggggggattcttgctgtcgttcaaatgaatcgccttcagccgccagaggccgatgatgctgtcaaattctgtcagcacgccgtccaggtcgtggacgatgtcgtatcctccgtcggacacgtggcaggtgtccaggcagacgcccaccttgccggagagctccacccggtccagaatggcccgcagctcctcaaaacggccgcctacttcgctgcccttgcctgccatggtctccagcagaacggtggtggcctgatcgggccgcaggatggcgttgagtccgtcggcaatgagagcgatgccggtctcgcttccctgccccacatggctgccgggatggaagttgtaatactgtcctggcacatgctccagcctagccaggtcgtccgccatggtctcccgggcgaatatccggttcttctcctccgcgccgcagaggttcaaagtatagggagcgtgggcgacaatggggccaaagccgtgccgggccagcaggtcccgcagggctgcagcgtccgccgggtccaggtccttggcccggctgcccctgggattgcgggtgaaaaattgaaaggtgttggcccccagctccagcgcctggcggcccatggccgcaaagcccttggaggaggacagatggcagccgatatacagcatggccgcgcctccttctctcggtctgtactgctctgcatccgccggaaggcggaaggagattatattttatcataccacatggacactgcctatgcacgggcaaaagcaacaaaaagcggggtctgccggccgaaaccggtgaccccgctgagacactgccggacgctggtaaagcggcggccccgtccggcgggggccttatatgtttcgggagagcggatcggcttcatcgtctgtgatgaaaagttcctccgccttctgctgcgcatcgatcagccgggcctggagccggcgcagggattcctccgcatcggtgatggcgttgaagagcaacagatattccttggagaccttctgcatttggtattcatcctttctaaaccgccacaagatctggggactgcccttatcatacacaaaggccgggcgaaattctgtctgaatctgtcgagatacccaaggttttgcaaaaaattcaaaaaccaacacaaaatagcaggaatttccgaaaaaacgaaaaaaatccagggccttttgccggaaaaaatggaaatggcaaaaaaaagcggtccgcgtcaggcgcggaccgctccggaattcaagtcaggtttcgggctgctccagctcccgcaggccggcgatgtcacccaccggcagggagaacaccagggactgagcggcgctctggatgcccgccttggccatgatggccttcataatgggcttcttcgcctcgctccgggccaggatgaagaccatctcctgctccgacgcgatggacacgccgaaaaacttccgcaccaggtctgtgccggtgcccttggcgtggatcaccgtgccgccggtggcgcctgcctcccgggcggcgtccatcaccaggtcggtggacccctggttggcaatgaccacgatcagatcgtgggcaatctcccgttccatagcagtttctccctcctgttcatgcagcagatattccttggcggtggatccgccgatgctgttcaccggcacagtcatcaaaacgccctggccgggcacatccagccacaggtcacgggccgcctggcgcaccagccgggggaccggggggacacgcagaacagcacggccttctccgtggcctccaggcccagaaagtccagcacctccgtggtggcggtgccctgacccagagctgtcagcaccagcgagatcccgtgggtccggaaccaggcggcgaactgctctgcccggctgcggtcagtgatggtgatgaacaaatcgacgccctgcatggcggtctctcctctctttacgatgtcggacggactgctcacagctcgatgatctcctcgtccaccggggcgggaggcgtctcctgagcggctctcttcatcttgagctgatacaaaaggcccagcatctggatggtcagcagcggcgtcatagccaccatagccaccacgccgaaggcgtccgtcaccacattgccgcccaaggcctcgcaggcgccctgagcaaagggcagcaggaaggtggccgtcataggcccggaggccacgccgccggagtcaaaggcaatggcagtaaagatcttggggacgaaaaaggacatgacaatggcggccagataccccggcaccaccagccagaaaatggaaatcccggtcatcacccgcatcatggccagaccgatggaaaccgccacgccgatggagaggctggtgctcatggccttgccgggaatggcgccggaggtgatctcctccacctgcttgttcagaacatggaccgcaggctccgcctggacgatgaaccagcccatcagcattccgatgggaatcaggatccagttgaaggacaggccggcgatctggcggctgaggtagctggccgccggcatgaagcccacgttggcgcccgtaagaaacaggaccaaacccacataagtatacaggatgccgatgacaattttcaatacttttttcttctttaatttcagggaaaccgcctgaaaaacggcgaagaacagtgcgatgggggccagacacaccgccacttcgctgagatacgccggaagttccacctgaaacaggtgccacagagcccggctgtctgtcacggaggggatttccaccggggtgtagacgcccgcgcccgggtagatcagggccagcaccatcaccgccaggatggggccgacagaacagagagccaccaagccgaagctgtcctgggcggcattctcgtcgctgcggatggaggccacgcccacgcccagggccatgataaagggcacggtcatgggacccgtggtgacgccgccggagtcgaaggcgatggccaggaagtcctccggtacaaagagggccagcgcaaacacgaggatgtagaacacgatcagcatccggttcaggggaatgcggaacaggatgcgcagcatggcgatcaccagaaaaacgcccacgcccacggccacagcgcccaccagcgtggcgttgggcacaccgggcacctgctgggccagcacctggagatccggctccgacacggtgacgatgacgccgatcagaaagccgacagccgccacaacccagagctttctggagcgggtcatggcggcgcccacccgttctccgatgggggtcatggcggtgtcagcgcccagggaaaacaggccgatgcccagaatcaccatcaccgcgccgatcagaaaggccagcagcgtctcggtggggatgggcgcaacagtaaagctgaggatcagcacgatcaccgtaatggggaccacggaggccaaggcttcccggagcttttcccagaggatggttttattccgccccaatcgttcctgccattgctctcgtctcttccacggcaatctcatcacctctccaaaattcatacaatttatatagatatgattataataacataaataggccgcccacagtgacgaaaaagcagaaatttacaaaatctttataagcggagcggtgattcccttttttcccgaactgtgctatgctgtaccatatcaccttcacaggagtgcgcaggatgaagaagagtccttacgacagagagcggttttttgaaaaatacagccagatggaccgctcccgcctgggactggcgggcgccggggagtgggagtccttggagcccctgctgccggacttcgccgggaagcgggtgctggatctgggctgcggctacggctggcactgcatctatgcggcggaacacggcgcggcggctgtcaccggcgtggacctgtcggagaaaatgctggccgtggcccgggaaaagaccacggctccgcaggtgacctatatccggggggatatggcggagaccccattcccgccggagagctttgacgtggtcctcagttccctggccatccactatctgccttcctttacagactttttggagcgggtgcggcagtgcctgtcacccggcggcgactttgtcttctctgtggagcaccccattttcactgctgccggtccccaggagtggtactacggcccggacggcacccccctccacttccctgtggaccggtatttcgaggagggacggcgcaccgcccgctttctgggggaggatgtgaccaagtaccaccgcaccctcaccacctatctggacggcctgcttaccggcggattccagctgctgcgggtggtggagcctcagccgccggcgcggatgctgggccagccgggaatgcgggacgagctccgccgccccatgatgctgctggtctccgcccggaagcggacggcgtggccgcacggaaaaccggggcggcgcgacggccccggatgaaaaactgctggaagatcatgaatacacagaaaggaaggactgctccatgaaaacaggtctggtgctggagggcggcgcgctgcggacgatcttctcctccggcgtgtgcgacgcttttttgaacgagaaactgcccatgccggactacaccatcggcgtctcggccgggattgcctacggcgtcagctacctctcccggcagaagcggcggaatctccagctgctgatgcactacgccaatgaccggcggtacatgggctgggggaatttctttgatccccggaatcgcagctacttcgggctgaagttcgcctacgacaccatccccaacgagctggtgccctttgattacgacaccttcgaggcgtatcccggtcaggtggaggcggtggtcaccaacctgcagaccggccgggccgagtaccgggaggtcccccggcgggacgccagcttcctcctgctccaggccacatgcgccatgcccgtgctgttccagcccatccggctggatgacggcgccccctatctggacgggggctgctccgacgccattccctggaagcgggcgctggcggtgggctgcgaccgggtggtggttgtcctgacccgggagcggagctatcggaaggagccggagcagctgatgcccctgttccggcgggtgtaccgcaaataccccgtctttctggaaggactgcggacccgggcggagcgctataaccaatgccgggaggagctgtttgctctggagcaggagggccgggtgttggtgatcgcgccggcgaacacccggggcttctcccgcacggagcgggaccggcagaagatcctggccctgtggcaggacggcttcttcgccggccgccgggctgcggaggcggtgcgggacttctggacgcgggagacaccttccgctgggacaccggaatagcagcagaccgccgcccatctttcagtgggcggcggtttcctcttggcggaagtggttttgcacaagaaatccgtactgctttttgcgttttaccatatttttacgcaaattttacaaaatcttagaaatcctctttccagcgtgccgctttgcatatataatgttggagcgcagtatacatgacagaatcggaccggccgtgccagacggtctggaatactgggaaaggaaagcgcagttatggacattttctccgtctttaccctctgcggcggcctggcgttcttcttgtacggcatgaccgtcatgtccaagagcctggaaaagatggccggcggcaagctggagcggatgctcaagcgcatgacctccagccccttcaagagcttgctgctgggggcgggcatcaccatcgccatccagtcctcctccgccatgacggtgatgctggtgggcctggtgaactccggcgtcatggagttgagacagaccatcggcatcatcatgggctccaacatcggcaccaccctgacggcgtggattctgtctctcaccggcatcgagagtgagaacgtctttgtgaacctgctgaagccggagaacttctctcccctgatcgctctggcgggtatcctgctgatcatgggctccaagcgccagcggcgccgggacgtggggcgcatcatgatgggctttgccattttgatgtacggcatggagctgatgagcggcgccgtcagccctctggcggagatgccccagtttgccgggctgctcaccgcctttgaaaatcccctgctgggtgtgttggtgggcgcggtgttcaccgggattatccagtcatccgctgcctctgtcgccattctgcaggccctggccatgaccggctccatcacctacggcatggccatccccatcattatggggcagaacatcggcacctgcgtcaccgccctcatcagctccatcggcgtcaaccgcaacgccaagcgagtggcggtggtccacatctccttcaacgtcatcggcaccgccgtgtgcctgatcctcttctacggcggcgacatgatcctccacttcaccttcctgaatcaggccgtgggggccgtgggcatcgccttctgccacaccgcctttaacgtgttcaccacgatcctactcctgcccttctcccgccagctggaaaagctggcgcggagactggtgcggaccgaggacacccgcgagagcttcgccttcctggatcccctgctgctgcggacccccggcgcggcagtcagcgaaagcgtcgccatggcaggccgcatgggacaagccgcccgggagaacatctgcctggcgacggaccagctctcccagtacagccgggagcgggagacccagatcctgcagaacgaggacaagctggacatttacgaggaccggctcagcagctacctggtggagatctcccagcacgggctgtccatgcaggatatgcgcacggtttcccgcttgctccacgccatcggggacttcgagcggatcggcgaccatgccgtgaacatccaggagtccgcccaggagctccacgacaaggagctccggttctctgacagcgcccgggaagagctgcaggtgctgctctccgcgctggatgacatcctggacctgaccatccgcagcttccaggcagcggacatggagaccgcccgccgggtggaacccctggaggagaccatcgaccagctgattgaggagatccgaagccgccatatccagcggctccaggcgggccagtgcaccatccagctgggctttgtgctcagcgacctgctgaccaacatcgagcgggcgtccgatcactgctccaacatcgccgtcagcgtcattgaggagtgctccggcggccccggccgccacgcctatctgcaggaggtgaaggccggcggcgccttcggcgaggacctgcggcgcgaccggaagaaataccatctccccgaggcatgacggaaagcggacaggctctgtgtctaccagacgcagggcctgttttttatcattcaggtatagccgtcccctgtcggagggaaaatacccctatctcaccgaaaacaggaggaatccgtatgtctgtggatctgaagaacagcgagaccctgaaaaacctcatgcgggcctttgcgggcgaaagccaggcccggaaccgctacacctttgccgcctccgtctgccgccagcagaagctgcatgtggtggaggcggtgttccgcttcactgcggaccaggagaaggagcacgcggagattttttacaaccacatgaaagagctggcgggccagaccgtggccatcgacggcacctatcccgtggacctgacgaacgatgtgaaggagctgctccgcaaggcgcagcacaacgagtatgaggagcacgacccggtatacaagaccttcggcgacgtggcccagcaggagggcttttccgctgtggcggcttccttccacaagatcgcagagatcgagcaggcccatggcaaccgcttcggcaggctggcggatctgctggaacagggaaagctgtttgtctccgatgtccagtgcgcctggatgtgcctgaactgcggttatatctttgagggggcggcagcccccaaggtctgccctgtgtgccagcacgaccagggctttttcgtgcggctggagatggcacccttcggggacgcggtgctgaaaaagtgaatcaggctcccaaggcggggaggccggaaaagcggcctccccgccctcttgcagtcggatctgaatattcactcttttattcatctgcaatatacatcgatgctggaaatattcacaaattttcggctgtttttccgggattgaaccggataaaatagagcactccaccaacaggggcaaataaatattcatttttgcacgaaaatctattgacaagagggagggaacgtgataaggtaaggcatgttccggcgggaggtgcttcctcccttggaaattcagagaaaaccgccccgcgaccgcgggagcatgaaaaagggagattgcgataccatgaagaagtttcttgcattgattctgacgctggccatggcgctgtccgtcacggcctgcggcggcagcgacgacactgcggatgacaccgccgacggcgagggctccggcacggaggagactgcggattacgcctccatgactgacgacgagctgaaggccgccatcaccactgtggagggcgggaagctcaccgtcgccaccagcccggacttcgccccctatgagttctacgccattgatgagaacggcgatccccagctggctggctttgatatggacctggcccagtatatcgccgactacctgggcctgtccctggagatcgttcccatggactttgacggcaccatcatggagctgcagaacggcaatgtggacttgggcatggccgggtactcccccgatcccaagcgtgccgacagcatggacttctctgacatttacatcaccggcggccagtctttcgtgtgcgtggagtccaacaaagacctgttcacctctttggaggatgccaacaatgccgactatcagatcggcgctcaggtgggttctatccaggcggatctggcgcatgagaacaccccggacgctgatatcatcgagctcgctaaggtgcccgatatcatcgccgagctggtgaccggcaagctggacggcgcctttatcgagaccatggtggccgagagctatgccacccagtatcccgagctgtgtctggtgctggaggtcccctatgacgccgaaggctctgtggtgggcgtcaccaagggcaacgccgccctgctggagggtgtgaaccgtgccatcgccgccgccaaggaggatggctccttcgatcagtatgtgcttacggccaacgagctggcttctggcgacatcatcgagggcctggtggacgaaaacggcgaggccgttcagtaagcttgtaaaactttcaattcctccctgcggctgcgcagggaggaattggccgctttctcatatattttggtaaagatagaaggaggaaccgcccgtgtttacagccgccggtttcgaaagaacttgggagtacatagaccttttcaaagagggcctgatttgtaccgtctccctctccctgctgaccgtgattttcggttttgtcctggcactgctcctggccatcatgcggctgtccaatgtgcggccgtttcgctttctgggtctgaccaaggacggccatctccgggaacagggcgtgctgatggtcctcagcagatttaaccccctcagcttcatcgccacggtttacgtggaagtcttccgtgccacccctatgctagttcagcttttcatgatctattatgtggtgttcggagatattgatctgccctctttcaagatctttggaaccattcgctttgaacggttcctcccgggcgtgattgccctgtccctgaactccggggcctatctttccgagatcatccgctccggtatccagtccatcgacggcggtcagacggaggcggcacggtccctgggactcagccaggtgcagaacatgcgattcgtgattctgccgcaggctatcaagaatatcctgcctgccatcgccaacgagttcgtcaccattatcaaggagtcttctatctgctataccatcggcgttcaggagatcatgtacgcggtttcctccatcaaaggtgcgacctaccgcattgcggaaccgcttgtggtggccgcctgtgtctacttctgcctgacgttccccaccagcaagatcatcgcttacttcgaaaggagaatgagccgtggcgaccggagataagctgatccaagtcaaggacctgaagaaatactacaaccggggcgccatcaaggccctggacggcgtcacggtggacattgaccggggcgacgtgatggtggtcatcggcccctctgggtccggcaagtccacgttcctccgcagcctgaacctgctggaggagcccaccggcggctccatcatcttcaatggggtggatatcacaaaaaagaagataaaaaatgcggagggcaaaacggtaaaggtggacatcgaccagcaccgccagaagatgggcatggtgttccagcacttcaacctgttccctcacatgaccatcatggacaacatgactctagcccccatccaggtgaagcacatggaccggggcgaggcggagaaaaaggccctggccctgttggaccgagtaggcctgcaggaccgtgcccgcgcctatcccatccagctctccggcggccagaagcagcggattgccattgtccgggcattgatgatggagccggaggttatgctctttgacgagcccacctccgccctggacccggagatggtgggcgaggtgctggaggtcatgaaggagctggcccaggagggcatgactatggtggtggtcacccacgagatgggctttgcccgggaggtgggcagccgggtcctcttcatggcagacggcaagctgctggaggagggctcccccgccgacattttcggaaatccccagcacccccggctccaggactttctcagcaaggtactgtaaggcagcctgagcccagtgccgcccgctgggcggcgggaccgggcaactgcggggcgcgcacatctgtgcgcgccctttttaacgggccggggcatccggcgcagaaaggagcatccccatgacagcagaaaagcaggcggccgtcgccgccatcgaaaaaaaagcagatctggtagcccaggtggcagatgagatctggtcctttgcggagttgtctctccaggaggagcagtctgccgacctgtactgccgagtgctggagcaggagggcttcaaggtggagcggggcatctgcaacatccccaccgccttctccgccttctacggcagcgggcggcccatcatcggcctgctggcggaatatgacgcgctctccggcctttcccagaagggcggcagcctgacgcgggaggagctggtctccggcggctgcggccacgggtgcgggcataacctgctgggcgccggggccatggccgccgctctgggagtgaaggcgtatctcgaggccgccaagatccccggcaccgtggtactgtatggctgccccggcgaggagggcggcgccgccaaggcatttatggcccgggatgggctatggtacggtctggatgcggccctcacctggcacccggacgacgccaacgaggtgcttaccggctcctccaactcctgcatccaaacccagtaccacttcaccggcgtggcggcccatgccgccggagacccggaccgtggccgcagcgccctggacgcggtggagctgatgaacgtgggcgtccagttcctgcgggagcacatgagtgacaaggctcgggtccactacgccatcaccgatgccggcggccggagtcccaacgtggtccagcccagggccagcgtgctgtacatggtccggtccaatcatgtggcggaggccgtggagctgcaggcccgggtggacaagatcgcccagggcgcagctctgatgactgagactacggtggagaagaaattcatcgacggcctggcggacaccgtcacgaaccacgccctggagcgggtcctctaccgaaattttgaggccctgggggtccccagttacacgccggaggagctggcctttgccgacagcctggccgggacctattccggcagtgaccgggcgccgggcgtgggcagccagtatgatctggactacgcagcggatgcccaggccaggcgggcccaggctggccacgccatgaaccgctttctgctgcccctgtaccaaggggacgccttccagcccggctccacggatgtgggcgacgtcagctggcagtgccctactgcacagatccacgtggccgcctggcccaacggctgccccggccatagctggcagaatgtctcctgcggccggacagacatcggccacaaggcggccctccatgccggcaaggtcctggcggcggccgccattgacctgctgacggacccggccctgctggaggaggcaaagacggagtttcagcgccggacggcggcaggctacacctgccctatccccgcggacgcggtacccaccatcgcagactgattaaaagggcgccccggtcaaagccggggcgcccttttgtcgaaacaaccaattattttttcaggttaccaaaaattttgtttgcttttggggaaatccatggtatcataagagcagaagcctcaagccccgacttccgcaccacagaacgcgcggagtttccgcccgaaaggagtcctgcccatggagtctcgctttgaccgccgggagctgctgtttcagccccggggaattccgcccctcggcacctcgctctccctggccctgcagcatctggtggccatgatcgtggggtgtgtcaccccgcctatcatcatcgccggagccatcggcctcagccaggaggagcaggtgctgctgatccaggcatccctggtgatgtccgccgtgtgcacattcctccagctgtatcccatcggcgggcggttcggctctggcctgccggtgatcctgggtgtcagctttgcctatgttcccagtatgcaggccatcgccgcctccggcggcggagtggcggccattgccggcgccatgatcgtgggcggcatcgtggctgtgctggtgggcgtgttcgtcaagaagatccgccggctgttcccgccggtcattaccggcacggtggtgttcaccattggcctctccctctaccctaccgccatcaactacatggccggcggcaccggcaacacctatgaatccgtggtggcgcaacaggggctgacggaggcgctggtatatggctcctggcagaactggctgatcgcggccctgacgctgactgtcgtgctggtgctgaaccacaaggccaagggcatctgcaagctggcttctatcctgatcgggatgctgttcggctatgcggtggcgctctgcttcggcatggtcagctttgccgacgtgggaaatgctgcctggttcgccctgccggagcccctacacttcggtctgaagttcgatccagcctcctgtgtggccatcgggctgttgtttgccatcaactccatccaggccatcggcgacttcaccgccaccaccgtgggcggcctggaccgggatcccacggaccaggagctccagggcggtatcatcgcctatggcaccagcaatatcctgacggcgctgatgggcggcctgcccacggctacctactcccaaaatgtgggcatcgtcaccaccaacaaggtggtgaaccggacggtgttcgccattgccgggggattcctgctgctggcgggcatctcccccaaatttgcggcgctgctgaccaccattccccagtgcgtgctggggggcgccacagtgacggtgttttccaccattgccatgacgggcatgaagctcatcgcctcccaggacctgacggcccggaacaccaccattgtgggtctctctgctgctctgggcgtggggatttcccaggcctccgaggccctcagccagttcccggaggcgttcaccatggtgttcggacagtctcccgtggtgatcgcaactatcatggcggtgctgctgaacctgattttgcccaaggagaaatgaaaaaacgaacgccggatgggtttccatccggcgtttttatttagggggcggggcgctcagatctcccggcggccctctagggcccgcatcagcgtggcgtcgtcggcgaactccagatgtccgcccacgggaatgccgtaggccaggcgggtcacccgcacgtcaaagggctttaagagcctggcgatatacatggctgtggcctccccctccgtatccggattggtggccatgatgacttccttcacctcgccgctggccacccgctccaccagggatttgatggccaggtcgtccggccccacgtggttcatgggagagatgacgccgtggagcacgtgataccggccgttgtactccctggcccgctctatggcggccacgtcccggggatccgccaccacgcagataacggagccatcccgcttgggggaggcgcagatgggacacagccccccggcggtgaagttttggcacaccgggcagcaggtgacgcttttcttggcgtccaggatggcgtcggcgaactccttggcctccgcctccggcaggcccagcacgtaaaaggccagccgctgggcagacttgccgccgatgcccggcaggcgggcaaactgctccaccagtttttcaagaggtgcggggaaatattccatggtctgatgctccttcaaagggttcgtatccggtctccggccgggtatgggaaaaagaggcgatcaccggggcagatcgatggcgaacagggccgccgtgccgccggtgtggacaaacagcaggtcgtcctgcccgtcaaaagctccctggcgcagcagctgcatcatgccggcaaaggccttcccggtgtagaccggatccagcaggatgccctccgtccgggccagctcctcgatatagggggtatcctccggattcggcagggcatagccggggcccatgtgctccaccatctgaaatgcattctcttccggctggaaggggcactccagcagtgctgcggcctcccctgccaggcgggggacgatcttgtcgaaggggccgctgtccacggcgatgccggtgaccttcacaccgggcagaaacagcccggctcccagcagcagcccagcggccgtgccgccggagccggtggcggagacgatgtgtcccagccgcacgcccgcagccatagcctggacggcgatctcccgggcgccgctcacgtagcccacggcgccgagggccgtggaggcgcccacgggaatatagcagcacttgtgccccgcctgctccagcgtgccgccgatccggtgcatctctgcatagatctcgtcataggaatccatgtccagcagacgcacctcggcgccgaagagctcgtccagcaccagattgccccggtgctccgtgacgccccggcgcttcagcagcaggatgcacttcatcccgagccgcgcggcgcaggcggcggtgagggccgcgtggttggactgggcgccgccggtggtgaataccgtgtcgcacccctggtccagggcctccgccagaacgaattccagcttgcggaccttgctgccgcccagggccacgccgcacaggtcatcccgcttgatccaaatgccccggccgtactgctcgctcagccggtccagccggtaaaacggggtgggaaacacgcccagccggaccctgggcagatcgtgcagattccgcatggcgcgcgccctcagccccgcagctccgcgatgcgggcggggatatcgtcagccttgtagacggcgctgccggccaccagcacattggcgccggcggcgatgcaggtcttgcaggtgacgggatccacgccgccgtccacctccagctcgcagccggggttcttctcatcgatccagcggcggatggcggagaccttgggcatcatatccgccatgaacttctggccgccgaagcccggctccaccgtcatcaccagcaccagttccacctcattcaggaagggtaggaccgtctccgcaggcgttttcggcttcagcaccacaccggcccgcttgcccttggcgtggatcctggcaatggcgtcgtggagcttttcctccgtgtcggactccacatggaccgtcaccaggtcggcgccggcgtcgcagaactgctccacataccggcccggctccacgatcatcaggtgaacatccaggggcagcgccgtggtggggcggatggatttcaccaccgggataccgatggtaatgttggggacgaacatgccgtccatcacatccacatggacgtaatcggcggtggagatgcgctggatatcccgctccagattggcaaaatccgcggagaggatggacggtgcgatttttatcatggaaagcccctcttttctttcattccggcggcagaccggacggaatcgggctgccgggccctgtggcgcgggaagaacccggcgcataggataccccgagcggcaggccgccccccagtctgcacttccgcgcagcgtccgcccctgggcggggcgccgccgcttttttgaatagggagccggtggagcgtacgctctgccggctctcagcttgcgtatataccgtattcagtgtagcagacttccggtgcaaaagcaacggtctcttgcccggacgagccgggaggccggccctgcaaaaaattccaaaagtgttgcataaaccacttctaaaatgagaatattctgataatctaataccagaatccaagagagaggcggtggaatcgtggaagagcagatcgactatgaggagcgggcatcgctgctgaaggccctgtccaaccccatccggctgcagatcgtccacggcctgctgatttccgggtgccacaatgtgggctgcatggaggcgtccaccggcatgtcccagtcctgcatctcccagcatctgcagaagctgcgggcggccaatgtggtgacggcggaacggtccggaaatgaggtatactatcaggtggcgtcccgggaggtggcctccctggtggccgacctgctgggagaggaggcggactcctatgtcctatgatgtgctggtgatcggcggcggccccgcggggctgtccgcgtccatcaacgtccgggcacgggggcgcagcgccctggtggtctctaatcccctggaggaaaatcctctctggcgggcggagaaggtggacaactacctgggcctgcccggcctgtccggcgcggagatgctggccgccatgcgccggcacgcggagcaggcgggggtggagtttctggcgggcaaggtgctgaacgccgtgcagatgccggacgcctggtatgtcagcgtggggccggatatgtacaacgccagggctgtggtgctggcggcgggcgtggcccgcgggaagaagtttgccggcgaggcggagcttctgggccggggcgtcagctactgcgccacctgcgacgggatgctctaccggggcaagccggtggcggtggtgggatacaccgacaccgcccggcaggaggcggagtttctccagaaaatcggctgctccgtgacctatttcgaccgccccaagcagtgcgagatccggggcgacggccgggtggagtccgtcacctgcgacggccggaccattccggcggagggcgtgttcatcctgcggcccaccatggcccccacggagctgttcccggggctggcggtggaacagggctatgtgacggtggaccggcgtatggccaccaacctccccggcctgtttgccgcgggagactgcaccggcggtccccttcaggtctccaaggccgcgggagatgggctgatcgccgggcagagtgcggcggcctgggcggcggctcaggagcgccgggaaaaacagagctgaacgtacaacatcaaatttgagtgtataaaggagacatgacgtatgggaatcaagcatttcaagactgcggaatttgacgccgccgtggcggcggcccccttggcgatggtggacttctgggccgactggtgcggcccctgtaagatgctctctccggtgatcgagtccctggcagaccagtacgagggtaaggtcctggtgggcaaggtgaacgtggatgaggagccggatctggcccggcggttcggagtcatgagcatccccacggtggtgttcctgaagaacggccaggaatttgaccggaaggtgggcgtgatgccgccccaggcgtttagcggcgtgctggacaccaacctgtgagctgccccgggcggtgcgcacagtccaaaggcgggaaatccgttaaagcaggccgggcctcttgaggcccggcctgcttctgcctgggcgcggcggcccagtccccgcgggggtggggaacttgccttccggtgcgcccccctttccttctgcggccagcaggggcagccccgccgcagggctgcccgcagcccattcgctggtgcggcaattcgggcttccgcttggtgccgtcctatcacaacggggcacagggattggggctgcaagggaaacgcacagctcccggaggccggtttcagaaaaccgtcggttttcgattcgccttttcacaagaaggggaaattcagctggaagacccggccgggaattacaggctgtgcgacttcaccgcgggcgcattcctagaccgggctgttttaacggtatactgggacccgcaccgcaagaccggcatgaaagcaggccctgtccatgtggacagggcctgctttcatgcttcgatgctgatggcgctgaccgggcagccgtcccgggcctcctgggccgcctccagctggccctccgggatgccgctgccgtgggccagcccgtcgtcgcccatgtggaatacctccgggcaggtgccggcgcacaggccgcagccgatgcagttctcatttactgttgcgttcatattggtcactcctattattccagaatatttccatcccggcccagtgtcaccacctgccagggaatgaacttgccgctctgccgcagggccgtctccgctgcccgctgcataccgccgcagcaggggacatccatccgcacgatggtcagctcccggatatcgttgcggcgaaggatctccgtcagcttttcggcatagtctccctcatccagcttggggcagccgatcagcgtgatgcggccccgcatgaaccgctggtggaagtccgcccgggcataagccgtgcagtccgccgcgatcagcagccgggcaccgttgaaccagggggcctccacaggcaccagcttgatctgcaccggccactgggccaggtgggacaccgcgccgtcctgcggcgcggaaacggcctgagccaccgccggacggagggtctgggccatactgccgggacagccgccggagggcggcgcctgccgcggcgcggtgcctttcagggcctccgccttctttgccaggacagctgcttcatcataggctgcggcctcccgctccacaaacgtgatggctccggtggggcaggtgggcaggcagtctcccagaccgtcgcagtagtcgtcccgcagcaggaccgccttgccgtccaccatgccgatggcaccctcgtgacaggctgcggcacaggcgccgcagccgttgcatttctcctgatcgatctcgatgatccttcttaccatagtgtgtctcctttttggggtttcaaacgttttgcttgctttctgagacctagtatcgtacaatgggataaaaaagtatgttgtttttacaacggaatggagaaaatggtatggaagtttctaccgcgcttcttctccggacgccgttgttccgcgggattccgcaggaggcgctgcctgcgctgctggagggcctgggcgcacggaagcgccgctgtggccggggtgaagtggtcctgcggcggggagagcgggcggaccggctggggctggtcctctccgggacgctgcatatcgtcaaggaggatttctgggggagccgcaccattgtgggcctcgcccggtccggagaggtgtttgcggaggcctatgcctgtctgggcggtgagccgctggaggtggccgtgctggcggtagcggatgcggaggtgctgtttctcaacagcgtacaggcgctgtcctgtgcccggccgggcgccgcggaattcacccggaacctgctgaccattctggcggggcggaatctgaccctcacccggaagattggccacatggcccgccgcaccacccgggacaagctgctcagttatctgtccgcccaggccatgcaggccggagggccggagtttgatatcccgttggaccgccaacagctggcagactatctggcggtggaccgcagcgccatgtctaccgcacttggaaagctccgggacgagggtgtgctgacgtttcaaaaaaaccatttccacctgcttcagcagatggagcagactgactgaggaggagagcgccatgctgacccgagtgccggattattatgaggcgtttcactgtctggcgggggcctgcccccacacctgctgcgaaaagtgggaggtggtggtggacgaggagaccgcccgccgctatcaggagacccctggctccctgggggagcggctgcgggaggcgctccagacggacgaggagggggatttctgcttcccctccggggcggccggtgcccctttctgaaccgagagaatctgtgcgagatccaccggatattgggagcagaggccacgtccctgacctgccggacccacccccggttcattgaggagtacggcccctttcgggaggtcagcctctgtgcctcctgcccggcagcctgtgacctgctgcttggctccaccgccccgctgtccttcctggaacgggagacggcggagccggaggaaccgggagacccgtggctctgcggcctcctgcccctgcgggagcggatgcttcgggagctggcggatcggcctcgtcccctgcaggagcggctggaggcatttttgctcctggctgcggaggcgcaaatcctgctggatgaggaccggacagaggaccttgcggctctggcagcggactggaagaagcgggagacggcggtaccgcccgggcctggcctgtttccacacgccctgcgggtgctgtccaagctggaggccctggacggggactggcgggagctcctgcgcagggcggaggaggcgccgcccgccgccgtgccggagacgctgctggagcggctgggcacatactttgcattccggtatctcctgaaggcggtcaacgacggcgacctgctggggcaggcgcagttctgcgtgctgatggtcctgacggcacagcgcctgacggcagtatgtggcttttgggaggctgtccgccgcctttgctgtgaagtggagcacagtgaagagaacctggaggcgctgcgcctggcgtttcttcgggatgcagctctctcccccggggcgtttttgtgccagatgcggagttgagcggctttgcccgcacctttgtgcattttgctcacggtaattgatttcgatttatggaaagcgtaaaaatacacaaaagcacttgacagcaaaagaaatctattgtacattatagacacaggaaaggagtgagtcccatgggctagttagctcagagattcccaatcatccctgcaccgttcggaatcgaggaattcctcaaaacgcgaaactccggaagaacccaaagacgaaacacacctcacgatgatgagccacacgagaatcgagttttggtagcaaccagagcagacgtctgcgtgtaccgatgttttatggattggcaaacccctgagttcccctgtttccccagcatccggacggtatctcaagaaagcaagaggtaatgcatattggaaactccgatccagaagtaggccccccgttcgtcgttggagcgagcggggggttgtgctgtatagagggcatccggcaaaaagcagggatgcggaagctgaaagcctgttggggcgccggagggcgcttttttgctgcgcagaagcaccgaaacagactgtgtgccgtctccggcggtacggtgacccggtccggcccgtgggccggatgcataaagctgccgggatctggcggagcgccccattcttatgtgcgttcacaccgcatgaatttttctgccctgaagggctgggaaagcggcagaacaccgggcggcccctcccctgccgcgtgctgcgggccctttcctctgcggaatgtgaaaaaagctcccgggccaaatggcccgggagcttctgcgtcgatcttacttgtggtccacagaggacatatagcgaatcagctccaccatcttgttggaatagccgcactcattgtcgtaccaggagacgaccttcacgaaggtgtcggtcagagcgatgccggcatccgcatcgaagatagaggtgcgggaatcgcccaggaagtcggaggacacaacgggctcgtcggtgtagcccagcacgcccttcagctcaccctcagaggcctccttcatggccttgcagatctcctcataggaggcgggcttcgccagcttggcggtcaggtccaccacggagacgtccagagtggggacgcgcatggacatgccggtcagcttgccgttcagctcggggatgaccttgcccacggccttggcggcgccggtggaggaggggatgatgttgccggtggcggcacggccgccgcgccagtccttcagggaggcgccgtccagcagcttctgggtgggggtgacggagtggacggtggtcatcaggccctccacgatgccgaacttgtcattcagcaccttggcgatgggggccaggcagttggtggtgcaggaggcgttggatacgaacgtcatatcagaggtgtacttgctgttgttgacgcccatgacgaacatgggcgtatcgtccttggaaggggcgcccatgaccacgtgcttggcgccagcgtcaatgtgaccctggcacagctccttggtcaggtgcttgccggtgcactcgcaaatatactccgcacccacggaagcccagggaatgtccttgacctccatagcggtaaagacaggatacttcttgccgttgaccaccagggcgccgtcctcggcggagacctcgccggggaacttgccatgcacgctgtcatacttcagcatgtaggccatatactcggggttcatgaagggatcgttcaggccgacgacctctacatcgtcatgagtcagggcggcgcggaagacgaggcggccaatgcggccgaagccattgatgccaatcttggttttcatatcggaaagactcctttcacaaaatcagacgcaccggcggcgcgccgtcaaaacgtttgcgtaaacgttttctaataatcgcacaagtatattatcatacggtcgacctttttgcaactgtcaattcagataacattttctgcggcaggttgtggataatccataagaaaaagggcatatttcacaatttttacacgaaacagggggaaaaggggcttgacgcggagggaaagctgtcctatactgaagtggctaattatttgcgtaaaccaataaaccattgcgcaaggaggctgtcccatgaaggtgaccatcagcgatgtggcgaagctggcgggagtgtccaccgccaccgtgtcccacaccatcaacaatacccggtatgtgtccaacgagacgaaggagaaggtctaccgggccatcgaggagctgggatacacaccggacgcttccgcccgcagtttccgcacgggaaagaaaaagatcatcggctttattgtgcccgatatcgccaataaattcttcgcaaccatgattgagtctgtggaaaaatatctctccgccaacggctaccagctcatcatcgccaatacccgggagaatatggaccgggaggagaccaatatccgcctgctgacggcgggactggtggacgggctgctggtggccagcaccatggacgatttccagcggttcgacgccctgatccccgcaggatttccggtggtgctggtggaccggatctttgagacaaagaagtactcctccgtctgcgtgtccaacttccagcccatctaccgcagtgtatgccggctggcgggaaagggcgaccagcggatcggcatcatcggcggcctcccccgcctctccagcacgcaggagcggatctccgcctatcggcaggctgtggcggactgtggcctgccggaggatgagcatttaatccaatatggcgactccctggagaacagcgcctgcgcctgtctggaccagctgctggagcgcaagtgcgacgccatcatcgtctgtcaggggctgatggcctcggagaccatcatctatctccaccagaagggcatccagctggcccaggacatcgacctggtgagctttgtggactatgactccgatgtgtacgccctgtacgccaatcagatggactccatcatccagccggtggaggacctggggcaggctgcgggcgagcagatcctcagacgggtggaggtgcccgacgcgccgatctttgaaaatgtgctcacatccacgtaccgcccctacaaccagcctcgggcctggtctcattcggaccgctgaactgaaaaaacgcgccgcagaagcggcgcgtttttcatgtcctggagacgttatccctggaagcgcaggtggaagcgggcgccgggatcaccggcaaagacaatcgttccatcctccggcaaggtgacggtggtgtcgccccacaggacggaggaggcagtcacctggccgtttccgtcatacacccagaaaccggaattctccggcacctgcacggtcatggtcttgccggcggcatcgccgacctgataccagcgggcatagccatccgcctgaatggtggtgtaggaggcgccggagccagtgaacagcgtgggcgctgcggccgcgtccatgtagaggctgcccttggcgttgatccagaggacgccgtcccgctcctccagctggtagtccacgccgtcccggctgcccacgccgggcacctggatctcagagcgggcggtggtctcgtccgcgatccgggcggcgccgatatagccggggatcgtttccggaacctccgcgaccgcggcggcgtccgccagcgccaggaaggtctgggagttgtatggctcgttcatgggcaggatacccaaggtggcgatgctgtcccaggcggcggctacctcaggagagagatcgttctccggcagcttcacggcggcgtagttggcgatgggcagcgcccccaggcccggcagaggggagacggcctgctggtacagataggtctggccgttgcgctctttcacaaaggagatgtaggacaacccggtggaatcccggaaggagccgtcgctgcaataggtgaaggtctgggcggggatcgaggtgggatagttcaggtaggacatggtcaaagtgccgtcggcctggatatccacctgatactgggcggaggtggagccgtagtacccggcgttttccagctgttccgcgggcatggcggcggactccgccgcgggcagggcctttacagtctggtccacggtgacgccctcctccgccagagcggcgatgaggatctgattggcggccagctggtcataggtggacacgccgccggagctgaccacagccgcggccatgtcatactccggcaggaccaccaggccggcgtggtagtacagggtgtcaccgcctttcaccagggcctggatgtcgctttggcagaagggataccactccatgttgtcccagcccaggccgtaggccagggagtccggctctccgctttcgggccacaggccccggctgtactccggataggccatggcgtccagagaggactggcgcagcagctccgtgccggtcagggcgccgccgaaggacgccagatcggaagccgtggcatagatgcctccggcaccgatggcgttcagggcatcctggggcagggcgcgggggtcggtgccccggtagatgggggccaaatcgttggcgtcaaagtccccgccgggagcaaaggtgcggtccaggtccagaggggccaggatatgttcgtccacatagtccatgaagtccatgtcagtgatggcctccaccaccagctccgccagggagaagccgtcgttgcagtagacgctgaaggcgccggggtccgccgccagccgctgggtggagagcttctccagcagggtgtcatgggcgcgtgtgctggcctcgccgaacagcatggcgtcagagaggccggtgcccaggatgccggaggagtggttcagcagcatccgaacggtgatgtccttgtaacgctcgtccgccattttgaagtccggcagataccgggtcaccggggcgtccagagacaccttgccgtcctccgccagctgcatcaccgccacggtggtgtagatcttgctgacggatccgatgccgtacagctcgtccccggtcatcaggcgattttcggaccgggagaaggtgccggtctggccggtgagaacgatctccccatcctgccacagggcatattgcaggctctgggcgccgccgtactgggcggcgtaggcggcggctgtgtccgctgtggtctgtaggtccgcggccgcagcttggggctccgccgccgcggcggggaccgccaggctcacggccaggaggagggccagaaccagggctctccagcgagtgtgaagtacgttcataacagttcctttcccgccccacagggcgtttgtgccggacgctccggcgagatgacagtgccaggatacaccttccccccaggggaaggtcaagtaaaaaatccggaaagatccggtccaacagacgttcccggggacggatacccgtccccggtgtctgccggaaacacaaaggcggtgttgagcgcaggactcaacaccgcctgatcttctggatcaaagcgcaacacaacgcccactccccgggttcgcacttgaaaaaagcgcaccccgccggtataatgggaaatacggtgcagtcagatgactgttgtgttgagtggtcatgacactcatcacagggacatagcgggtggccgcccgctatgccctgccgcaatttatgcttccgcattcagtttaaccgatggagaatggaaaatcaagggctttccagagtttctcgccatatagaaaacggcacggcaaccgccgtgccgctctttttatgtcttgctccgccctgccgccagcatgaacagcacgccgatgacgccgaagaccaggcacatccccagcatggcgtcggcgccgccccagtcgatggcgtaccccgccaggaagttgccgaacatggcccccaggccgttggaggcgatcatcataatggactggcccttcacctggtccaccggggagacgtttgcgttggcgtagtagaccgaggcgggggtgaacagcccgtaccccagcagctggacgggctgcaccagcaggagtccggagaggccgggggccagcaggaacagcaggggcttcaccgccatgaagcagatggacatccgcagggtccccgccgcgccgaagcggcggaacagcggcgtgaacagcagcgccgcgggcagctccgacgcccccatcagaaacagtgccagacccaggtgcccctcgtcgccgccccggtctgagacgaggttcaccatgaagctgacgatgggcataatggccgccagggtgaagaacaggctcaccagcgtcagggtgaaggggcggctgcttttcagaatgtacaatatggagtggggccgctctcccccgccttgggcctgcaaggcatctttgggaaaggcagggtacagggccaccaccgcgatcatcagcaccagcagcgccatgtgggtcagcagcaggctttctgttccgaagcgcaccgcctgctggccgcacgcaacgcaggccagggcataggacagagaccccagcccacggctgaggctgtacgacatgtccaccccggcggcgatgaactgcaccgccatggagtccagcagaggataggcgttcagctccagaatgcccagggtcaggaagatcagggcggtgccccagaagccggggcgggtggtgtagaataccacattcacccccagggccagcaccagacaggcgttcagcaggcgtttgatcggcacctccgggtggcggtccgcccagcctcccagcaacggctgagccaaaatgccggcaaagcagcgaatggaggcaaagatccccgcctccccgctggtaaagccccgccccagcagcagagaggtctggtagcccgcgaagatggcaaacatggcccagtagaccacgtggaccagcgtataggatacgttcagccgccgcagagaggggaattcggtcatacggtctcctttccgggaatcagcagacccagcaggggttcaaaatccacgccctcccgcataggcaggtcttccgccgcggtccgctccgcgcaggcacggacgaacgccgccgcctctccggcggcggaggagagggactccccccgcaccagggccccggtgaggacgctggagaacacgtccccggtgccgtggaactcatgggctacataggcggtctgaacggcctccgtcttcccggtgcgggcgtcgaagcagacggcgccggtccggccgggggccagagaggcgcccgtcagcaccacagaccgccgccctcccaggctcagccgctccgtgatctcccggaggcccgcctcgccggcgggcagcgtctcatagggctggcccagcagcagcgctgcctccgtcaggttgggggtgatgacgtccgccagctccgccagccgggccatgccgctgcacatggcggcggtgtaggtctggtagacccggccgtagtcccccatcaccgggtccaccaccaccacggtgtccggtccccggaaccggcagataaagttctccaccacgccgatctgccgctcactgcccaggaagccgctgtatacagcctggaatgtcaggcccaagctggcccagtggtccgccaccttggacatttcgtcggtcatgtccagaaaggtgaacccctcgaacccgccggtatgggtggagagaaatgccgtgggcagggggcagcactggacccccatggcggagagaataggaatggccacagtgagagaacaccggccgaagccggacatgtcatgaatggcagcaacgcgtggggtcatcatggtacgcttcctcttttcaatggttttgaacagactgcatttcattgtatcgtagattttcctattgttcaagaggaagagatgtgatatactgcaactatcccagcatcatctctgcgggtatggtggaattggcagacacgatggatttaggttccattgggcaaccgtgcaggttcaagtcctgttacccgcaccagctcgccgcaagcgtcatatcgcttgcggtgagctttttcatttcattgcagagcttatcgtgcgctcgttctgctgcttttcgattccaaactgaaccaacttcactgggcttcggtttgggtccgccgctttgcggcgattttatcttactcacgaggtaatatcgactccaaccggccctgccatcaaaaggggcatctttttgggatgtcccttttgacgggtttcgctgtccggagggatggctccgccctccgatgctctaaaatacgcgggtgaatgaatttgcattgcgctaggcatccgctttccgggaaaacacctgcccgccgcccgtgccgactggaagggcggtgctgaaaatgtggattttgaccgaaccgttcccgcccaaaaagaacgatatccagaggccgccggtttttgacgttcggcggccagagaacggctccaaacagccggtccccttctgtgcttccacggtcccgcagccactgccgtgccgctggccgcgccctgattgaaactaaaaaaaggagacgcgctgaaaagcgcgtctccttttacagcagagtttgaccgtggtgcatccggcacggcagggcggcggatcagacctccaaattccggccggtctcccggtcgaagacatgggccacgttcccgccgaaggtgaacggcagggcgctgccggtggcgggaatcggatgccccgccccctggagatccatggtctggaggatgacgatggtgtcccgcccgcaggcgtccacgtggagatggaccgcagagcccatcatctccgccacgtccacagtgccccgcaccgcctgggacgcatccccggccagggagatgtgctccggccggacgcccagcgtgatggggccgggctggacctgcttccgggccaggttcgcctgcttggcttcggagagttccacccgggcgttctccagaaccaccgcatagcggccgtcttccttcaccagctccgcatcaaagaagttcatctggggcgtgccgataaagcccgccacgaacaggttcgtgggatggtcgaacacctcctggggcgtgccgatctgctggatgacgccgtccttcatgatgacgatccggtcgcccagtgtcatggcctctgtctggtcgtgggtcacgtagatgaacgtggtgtcgatccgctggcgcagcttgatgatctccgcccgcatctggttgcgcagcttggcgtccaggttggagagcggctcgtccatcagcaggaccttgggctcccgcacgatggcccggccaatggccacccgctggcgctggccgccggagagggccttgggcttgcggtccagatactccgtgatgcccagaacctccgccgcctgatccacccgcttgcggatctcctccttggggtacttcttcagcttcagggggaaggccatgttctcccgcacagtcatgtgggggtacagagcgtagttctggaacaccatggcgatatcccggtccttgggtgccacatcgttcatcagcttgccgtcgatatacagttcgccgccgctgatctcctccaggccggcgaccatccgcagggtagtggacttgccgcagccggaggggcctaccagcacgatgaactccttgtccgcaatgttcaggctgaactcctgcactgccagcacgccctcatccgtaatctggaggttcgtcttcttctcctcagagccctttttcttcttggcgggttcctggtggggatagaccttcttgatgtttttcagaataacttctgccatgatatcaggctctggaaacagcgcctccgcagctgttccctcacggccggccggggccggtccgcctctgtggcaggtctccacgctgccgcaccgcgagccaggcggggttctcctccttttttcgtcccgctcccggcagaatgtggagtgccggagcggacggatatgtcgtatttgaccggggactcaatccgggatggacaggtatgtgccctccattgcgccgccggcgcctactgtgaacgtcagggcctgatggggggcgggactgcgccgtccggaccgggcgggcagtcggaaaagtacagccgtgcgccgctgtccgccatcatctgcaggatggccggatcggcgctgttgtagcggcggtcgctggatgcgcagcacaccaccgcccggggagcgatggcctggatctgttctgcagaaataccgtcccgctggccgtggtggcccaccttgaagaggtcggcccgcagggaggcggggtccagccctccatagcccatgtagttggtgtcgccggggagtaggatccgggtcccccggtactccagcaggaggatcaggctgtaattgttcatggccgcgtccagctggtccaggcgctgccagaaagcggacgggtccgcctcctcatacagtgcccggcacgaggacgccagcttctccgcctgtgcacgggaggggcccagcacccgaaccaagagatcccggcacagccggagctccattccggccagaggccggtggcgcgggcagctctgccccaggcagaggcggcggtagtcgttcagggcccggagaaacttgctccgggagggcgtcaggccctccgccggaatgtccagcgtccgcatggagcggcaaaactccgggggcagcgtctgccagagggcagcgggaggcagcttctccgccgcgggcagcaggccgcacaggtggtcctcatggacatgggtggctgccatcaggtcgatgtggtccacgccccgcagggagaggtactggtccaaggggatacggccggtggcgctgtcccggtactcttctgcttcggcgctgccgccgtcgatcaccatgacaaaggtgccgccggggaaggccgggtcgggacattccagcagggcggcctccccatagcccacgttgacgaatgtcagcttcagttcttccataggcgctcaacccatggcccgcttgatgtagaagctggacaggatcagcaccagcaatgtcatcacgatggcgccggcgctgccgaagccgaagtccagagacttgataccgtatgtatacaagaactgagtgatggtcgtggtggtgcccgccgggccaccgccggtgaggacgttcaccttctcgaacaggcggaaggtgtcgatggtccgcagcagggcgcacagggccaggctgcccttgatgttgggcagggtgatgtaccagaactgctggaagaagccggcgccgtcgatgcgggcggcctcatactggttctccgacacggactggagggaggcgtacagcagcagaaacacaaaggggacgttctgccacacgtcgatcagcaggatcgtgccgaaggccgtttttgtgtccatgaaccagttgaacaccggcaggcccagtcccttcaggaactggttgatgatgccgtagttggcggagagcatcatccgccagctgagggccaccgtgacggcgggcagcagatagggcaggagcagcagcgtccgcataatcttctgccctcgcttgagggagttgacaaatactgcgatcagaaggccgagggccatctccagtaccaccgccaggatagtgaacttgatggtgttccacaccgcctgctgaaaatatccgtttttaaagagggagacgtagttatcgaacagcacaaaagaggcgttctccgtgcccttcaggtagttgtagtcggtaaagctgtatacaaatgtgaaaatcaggggataggccgtcatgaccagcaggactatcagggtgggcgtgagcattccgatcccgaaccggtttgtggccgcctgggcgctattcagttttgcaatctcgtttctcttcatacattggcctcacaaactcgagaggtgtggcccagggcccggctccggggcttttggaacaacggccggggcgccagacggcgccccggccggccgtgtcatttctgtttcagagaggctgggctcaggccatcagctgctccagctgctcctgggcgtaggccagcgcctcgtccatggtcttggtgccctggatgatgttgtccatctcggtgcctaggatgttggtgaactccgtccactcctcgatcacagggcggtacacgccggtctccagagcgccgcagacggtctgcaggtggggataggtctccagcacggtggaatcggtcaggcagctgtaccggcagggcacgccgttgttctcaatggaggccagctgcacctcggggctcatgacgtactccagcagctccagggccaggtccttgtggggggcgttgtcggggatgccgatgcaccacacgccctgcagggccacggcgtccacaggcgcggagtcgtcggtcagcttggtggggatggtggtgtagttggcaggaccatcagcagtgggggtgtaccagccgggccagatctgggccagggcggtctcgccggaggtcacggaagccacgatgtcgtccttgtccagggtgctgcccagggcgtacaggtccaggtactcctgcatggcggccttgaactcgggagtgtcaacggtggggttgttgttctcatccacgacccagccgccgtggacaaccaggtggggcaggaagtcggacaggatgttgtcggcgctgccgccgcggatcaggaaaccgttcttgttggagtcggccgccttggtcttctgggcgatgtccatcagatccgcgaaggagtcgatatcctcgggggcgtagccggcgtccgccagcagctgcttgttgtacatcatgaccgtcacgttgccgtagtagggagccaggtagatgtcctcgcccaccttgcagatggtggtggtggcgggaatgatgtcgtcatcaaagctgtatcccatctcgctgaggttggccagtacgccgttctcagtgaactcggccatccaggagccgtccaccatgcacaggtcgtaggtgccaacttcgttgacggcatccagggcgatgccggtgtgcaggtcgtcgaaggacatgagcatcacttcgatgtccacgttgtgctccgcttcaaagggggccaggctggcctccagggactcgccgtaggcgccgccccgcaggatcagggtcatcttggtgggctcgccggaagtgctgccctcgctgccttcatcggccgtgtcctctccaccgccgccgcaggccgccagagacagcgtcatggccagcgccaggaccagggtaagcagttttttcatttcgtttcctcctactcttttccgcttgatgttgtgtcagggatcggaagtgcgatgtattttgttactctttgacagcaccgcttgacaatccggagatcaagtagttctgcgcaaagatcacaaacagggtgatggggatgacagacaccacgccgcctgcggccaccaggccaaagttggtcaggttgtcctccgtgttcagcaccgacagcgccaggggcacggtgtagttgctggggctgcgggtaaagatgaccgtgtaggtgtactcattccaggcgtacatgaaggacagcatggctaccgcggcgatacccggcgccaccaggggcaggacgatcttgcggaagagctgccactctgtggcgccgtccaccttggcgctctcctccacctcctccggcaggtcctggaaaaagctgatgaggaaccagataatcagcggcacgttgatgagcacgcaggccagcgtcaccgggatcttggtgttcaacaggccgatcttgctgaacatggtgtacagggggatggtgaaggccaccggaggcagcacgcggaccagcagcacccaataggtcattggccgcttcagcccgaagcggaatctccgccgggccaggatataggcggcgcagactcccacgatcagcgacagcaccagggagctcagcgtggtctgcaggctgttgatggcggcttggccgaagcccttgctgacaaacaggctgataaaatgctcaatggtgagggactgcgggatcagggagatatgcccctgcatctccgatgtagggcggatggccatggccaccagccaatagatgggaaacagggcgatcaccaacagcagggcgcagcccaggacttttcccactgtcccggctctttttctcgctttcatatcctctcctcctcgtttttgcgcatggcaaaattcccgccgcgcacccgcggcattctgtatttttccaaagtacgggtcaactggagccgcgcacccgcagctctgtgggcaccaccgtgacctgggggacgtccgtctcccctgccagcagcgcctggagccgcgccacgctcaactcccccatccggcggcagtcgatgtggacggaggtgagctccggctccagcatcccgcaggcggagctgtcgtccagtcccgtcaccgccaggtcttccggcacccgcaggcccaggcggagggcggccttcatggctccggcggccatcacgtcgtttccgccgaagatggccgtgggccggtcctgccgggacagcagctccaggcaggcctctgcggcactctccaccgtgggatcgcacagcttgatgtgccgggtgtctgccggcaggccgtgggcctgggtgacttccagaaaggcccggtaccgctctcccagtatatagggggagaagcgccctgccagcatggcgatgttccgatgaccccggccgatcaggtgctccagcgcctggcggaccccgccgtattcgtccgacaccacgcagggaatgtccagtccctggatgcggttgtttaccagtaccacggccagatcccggttctggagctctgcgatcatatccggtcgggcattgccgcccaggatcacaccctccacctgtttgtttttggaggtgttggaggccgtgtcccagtccgcagcggtggaaatgaccaactcaaagtcacttcggttcgtctcccgcatgatcccggtgcagatgccggcgtagaattcgtccaggatcgtggccccctccttacagatcaggaaggcgatcttgtccgttcgctggcgggccatggcccgggcgatggcatttggagagtagtggagcacttccgctgcttcaaacaccttccggcgggtgtcctcccggacccgctccggattggagaacgcgcgggacacggtggcgatggaaactccggacagtctggagacatcatagatggttggattcacggtcacgccccttttcacgtaagcgttttcatatttttcgtaggaaaataacagtttttttgttgtaaagcttccagtgttttcctggatcaagtcaactttaacacttttttgcggtggaagcaagggattctttgtatttaatgtacattttacacaggtgtagaaaagctctaacattccttgtatagatcggcagaaatgtaaccgcttccattaaaagcacttatgacagatgatactgctccgggaatgtgagaggtgcttctctccaggcttgtctttttcccgcgcctatattatactgttcacggaattctcaggaaaagagctgatgggatgtacagagccaggtccgccctccgccatgggcagatgtccgaggcattttccaccatggtttttctgaccctgtccggcgggctgcaggacgcttacacctactgcgtccggggacaggttttcgccaatgcccagacgggaaacatcgttcttatgagccagcgggcctttgccggggatctggccggcgtcctccggtatctgatcccgctgctggcctttgcgctgggcgtctttgctgcggagatggtccgccgccgctgtcaggagatttcccggctccactggcggcagatggtggtgctggctgagatcggcctgttgctgggcgtgggattcctcccatcgtcctgggatgcgccggccaacgcgctggtgtccttcacctgcgccatgcaggtccaggcgttccgcaaggtcaacggcagcgcatacgccagtaccatgtgcatcggcaatctccgcagcggggtggacgccttctgcgcctactgggacacccgggaccggaccgccctgcggaaggccggccgctacttcgccgtcatcctcatttttgccctgggggccggattcggcggcgttgcctcccagctctggggaacaggggccatctgggccagctgtctgctgctggccgtcagttttcttctgatgttccggcaggagatccaggcggaagcggactgctgaggatgcggggaacggcctccatccggatttcacaccaataatgatatgatgaggagaatgagaaccatgtctgaaacagccaaaatgctccatgtgaatctggcccccggagaggcgggccgctacgccatcgtccccggggatccggaccggtgcgagctgatcgccgcccacctggacaacccccgcatggtgacccggaagcgggagttcaccacctgggagggcacgctggatggagagcgggtcaccgttacctccaccggtatcgggggccctccaccgccatctgcgtggaggagctccataagtgcggggcggataccttcatccgggtgggcacctgcgcctccacctgcgccgacgtccagtgcggggacatcgtggtggtcagcggcagtgtccgcatggacggcaccagcctccactacctgcccatggagttccctgccgtccccagctaccagctgctgaaggctctggaggagagctctgtgtctctgggctttcacaccacggtgggcgtcagcatcaccaaggactccttttacacgcaggcggagccggagacgaagccggtgtccgatgatctgatccgccgctggcagagctatgtccggggcggtgccgtctgcacctccatggaggagtccatcctcttctctgtgggctccagcctggggatccgcaccgcctccatcctggtatcagccaccaatttcgacgggtccgtctccaagcgcaacagcgccgacgtctatcccaccgacagcatccagaagcccatcctctccgccatcgaagccctgcgccggatcatccggcaggacaagggctgatctccctccggatatcaaaaccgccccgtgccgcaggcacggggcggtccttttatatcacatctctccgccgtactcccggcggtattcctccagctcttccgcgtcccggtcatccagggcgtgaaggccgccccggccctccatgtggtgggtcagctcatgggacagggtggtgtacagctcgtcctcccatgtttcctggccccagtcctcccgctctgcaagggcggcaaaggagccgtagtacaggttgatatactggcccagcaggtcgtcgcagtactcccccaggatatacatctcgccctccgggaactccgggtccggcttggcctcctccagcaggttgatcccgccgttgaggccgtcgaacaacgccgccgggaaactgtctgccatgtcgtccagcaggtcgttcacccggtcgatggtcaggatcatggctgtttccctcctcacgccttgggcacctgcttcatgctgaggccgatgcgctttttcttctcgtccacctccagcaccaccacctggacgatgtctcccacagacaccacctccgaggggtgtttgataaacttctgggacacctgggagatgtggaccagcccgtcctggtggacgccgatgtccacgaacacgccgaagtcgatgacattccgcaccgtgcccgtcagcaccatgccgggcttcaggtccttcatctccagcacgtcggtgcggaggatgggcttgggcagctcgtcccggatgtcccggccgggcttcatcagttccgccgccacgtcccgcaatgtgggcacgcccacgccgcagtccgccgccgcccggtcctcgccgtaggtcctgatctgggcgttcagatctcccagcttcccatcccgcacgtccgtgagggtgtggccggtgagggagagcaatttctccgccgcggcgtagctctccgggtggacggcggtgttgtccagcacggagcggctctccggcacccgcaggaagccggcgcactgctcaaaggccttgggccccagcttgggcaccttcaagatctgcttccgggaagtgaaggggccgttttcctcccggtaggccaccacatttttcgccgtggtcgcgttcagccccgccacacgctgaagcagggagggggaggcggtattcacgtccacgcccacggcgttcacacagtcctccaccacaccgttcaaagcctcgtccagccgcttgggggcatgtcgtgctggtactgtcctacaccgatggccttggggtcgatcttcaccagctccgccagagggtcctggaggcgccgggcaatggacacggcggagcggaggttcacatcgtactgggggaactcctccgccgccagggggctggcggagtacacgctggccccggcctcgctgacgatcatgtagctgacatgggcgccggcctcattcacctgccggatcagcttcaccgccatctgctccgtctcccggctggctgtgccgttgccgatggcgatgtgctccacgccgtgctttcggatcagctttgccagggcggcgatagcctcgttctcctgccgctcgccgtaggtggggtataccacggcggtgtccagcactttgcccgtgccgtccaccaccgccaccttgcagcccatccggtaccccgggtccaggcccatggtgaccctgcccttcaccgggggctgcatcagcaggggcttcagattcagggcgaactggccgatggccccctcgtccgcccgctccgtcaggtcggagcgagcctcccgctccagggcggggaagatcaggcggtcgtatgcgtcctccgccgcggacttgataaattccattgcggcgctgccggggacgatcacatgccgccggacggcctggagggcccggtcccggtccagctccacgcggaccttcagaaagccctccttctcccccggttgacggccaggatctggtgaccctgaagccgggagagggcctgggagaagtcgtagtacagccggtagacagagtcctcctccaccgccgcctgggagcagagctttccctcccgctccaggagggtgcggagggtcttgcggagggcggcgtcgtcgctgatggtctcggcgatgatgtcggaggcgccggagagggcgtcctccaccgtctccacgcccttttcggcatccacataccgggcggcctccgccgtcgggtccgggcagtccggcccctgggcaaacagcagctccgccaaaggcgccaggcccttttcccgggcaatggtggcccgggtgcggcgcttctgcttgtaggggcggtacaggtcctccacctccgccagcgtccgggcggcgtcgatggcggcggagagttcctccgtcagcttgccctgttcctcgatagaccgcttcaccgcctcccggcgttccgccaggttccgcaggtactggaggcgctcctccagattccgcagggcggtgtcgtccatggcgccgtgaagctccttgcggtagcgggcgatgaagggaatggtgttgccctcgtccagaaggcggaccacgttttccacatggcgggggtctttgtccagctcagatgccagttgttgaatgagatcctgcatgggttatgattcttccttttctacgtgaaatagggcggcagtctgctgcccgggaaattcagctatgggataaccgggcagatacacccgatactgggggcgggtgccgccggatgccggatagcggtgaagggatcgctgttcccaaagaagggcttgcacaacggggcgtgtgcggccacgtccccaaaggaccgcttttggatgcgctccggtgcagtggttctcctcgccggcaggaagcggcatatcggtatctgcgccaatcatgtctgaggttcgggtgcgctgttctttttgcggggcgtacagctgctgccccatgccgggaatgctggcggcacaggtgtggctaccgaattacctcttcctctggtccgctgctgggtatcctgtcggggcagcccgtccgtctttataaccctggggccgtgcggccaaccagatcatctaaagtgacgccaaaatagtctgccagggcaatcagcccttgaaaatcaggatagcgcttcccctcttcataatagcgataggcccgcacagtaattcccaaatgggctgccagatcctcttttgtggcatttttttcttttcgcaattcctgcaaacgctctgaaaatctttccatatattctccttgacggaacttaaagttcctagtataatgggaacataaagttcttcgaggtgcatgattatgaacgacatcttgtctgccatctaccggaatcttctggagagccgattttcagcatctctctcctgcccggattaccggcgagctattatacgggtggaacagtgcatggatgagctgcgccaggcactacctgccgaagagcaggagctgccggagcagttctgggacgcctgctccgacctccagctccatgagatggaggtcatgtttcaggtaacatggaccgcggcccgggaaatctgattcctgttttacttatgatagagcttcttcgtctcgtaccgggcctcgcagctgacgttgatgcccaggcggcgcagaaggttttcgtccacctcgctgaggatcaccgtgaagtgggcgtcgcagccccggagcttgggcagctgctgctgggccagctccgccagggggttggtcagggcggagatggtgagcgccatcagcacttcatccgtgtggagccgggggttcttgtggcccaggtactgggtcttcagccggcacaccggctccagcacctgggcggagatcagctcgaactggtcaccgatgccgcccacggccttcagcgcgttcagcagcagggcggaggccgcccccagggtgtcggaggtcttgccggtgaccacccggccgtctggcagcaccatggcgccggcagggccgccggtggtctccgccttcagcagggcagcggacaccgccgggcagatgtccggtgtgacgctcgcctgttgcatcaccagctccagcttccgcaccggctcgtccccggctttgccccgcagccgctccacgcaggcggtgtagtagcgccgcaggatctccatgcggctggcggcgcagcacaccgcgtcgtcacagatgcagttgccaaccatgttcactcccatgtccgtggggactggtagggggacgtgccctggatcttctcaaagatggcgttcagcaccgggaagatctccacatcccggttgtagttgacggcagtcttgccataggcctccagatggaaggggtcaatcatgttcacgtcgttcagatccgccgtggccgcctcgtaggccagattcaccggatgcttgaggggcaggttccagatggggaaggtctcgaacttggcgtagcccgcagcgatgccccgcttgtagtcgtggtagagctgggagaggcaggtggccatcttgccgctgccggggcccggcgccgtcaccaccaccagcgggtgcgtggtctccacatactcattctttccaaggccctcgtcgctgacaatgtgctgcacgtcggaggggtagcccgcgatgggatagtggcggtagcaccggatgcccagggtggtcaaccgcttcaaaaaggcgtccgccgccccctggccgctgtaccggctcatcaccacgccgcccacatagaagcccatgccccggaagatgtcgatcagccgcagcacgtcgtcgtcataggtgatgcccaggtcccccggaccttgtttttctcgatgtctgcggcgttaatggcaatgaggatctccacgtcgtcctgcagctgctggagcatccggatcttgctgtccggctcgaatcccggcagcacccgggaggcgtggtagtcgtcgaacagcttgccgccgaactccagatacagcttgccgccgaactgggcgatgcgctttttgatctgctcggactgggtggtgaggtacttctgattgtcaaaaccgatggccggcatacgatcttccccttttctctctggttgttcaaaatccggtgatagtataccacaccctgtcccgttttggaagtggagaaccaaggcttttccgccgcgccctgcatcttgcaggcgtccagctcccatggtacaatcagcggagaatttgcagggaggggatccagatgcgcaacacctttgaccgcttcaatggccggcaccaggactatcaggccgccagaccttcttatgcccaggaattcctggactggctgggagagctgtacgcgccgccggagcgctatacagcggcggacatcggatccggcaccggcaagctctccgcccagctgctggcagcgggcttccgcgtctgcggcgtggagccgaatccggatatgcggggggcggcggaggcgcttctgggcggcgatccccggttctcctcctcaaatggaacggaccatgataccgggctgccggaccggtccgtggacatggtcgcagcggcccaggccttccactggttcgacggtcctgcctttgcgcgggagtgccgccggatcctgcgtcccggcgggcgggccgttctcgtctggaacgtccgtgggtctgcaccggtgaaccaggccttggcccaggtctttcgggagcactgcccgagctttcacggattcaccggcgggatgggggaggacgacccccgcatccgggattttttcggcggggcgtatgaaaagcggcggttccccaatcccctgacgctggaccgggaccgattcctccggcggtgcttttccagctcctatgccctgcgggagggagacgcggattacgaagcctttcgggcggcgctggaggcgctgttcgacactttcgcctccggcgggcaactgattcagcccaacgagactgtggcctatgtggggatccccgccgctccccagggatgaggcatttccagaattgaaaggtcgaccttatcagaaaaaataatgcttattattacaagttcaggctttacttatggaaaatcagccgatataataactaaggttgggcatctttggagaaaaggtcgacctgaccggagtgtctgtaaatcaaaaccgggaggtttttggatatgtcaaattgtgccatcgtgggaatcaactggggagacgagggcaagggccgcatggtagacctggtgaccgcggactacgacgtggtggtccgctatcagggcggcggcaacgccggccataccgtggtgaacgagttcggcaagtttgccctgcacctgctgccctccggcatcttccgcaagggtgtggtgaacatcctgggcaacggcgtggctctggattgcgagagcctgtggaccgagatgtccgacgtcatggaccagggcgtggccatcacgccggagaacctgaaaatcagcgaccgggcgtccctgctgctgccctggcaccgggacctggactccctggaggaggcccgcctggcggacaagaagtacggctccaccaagcagggcatcgccccgttctattcggacaagtaccagaagaagaccatcatggccggcgagctgctgtacccggaaaagctctgggaccatctggcgggcattctggagtggaagaacctgacgctggagcgggtctacggcgccaagccctacaccatggatgacctgaaggcatgggtgacggagtttggcgagaagatcaagcccttcatctgcgacaccggcgccttcctgcgccaggcccaggccgagggcaagcacatcctgtttgaggcccagctgggctccctgcgggatctggactacggcatttacccctacaccacctcctccaaccccattgcggcgtatgcccctgtgggctccggcctgcccaccgccaagctggacaagatcatcggtgtggtgaaggcatactcctcctgcgtgggagagggccccttcacctgcgagtggttcggtgaagaggcggagaagctgcgggaggccggcggtgagtacggcgccaagaccggccggccccgccgggtgggtcccatcgacatcgtggccacccgctatggcatccagtgccagggagccacggacatcgccctgaccaagctggatgtgctcagctacatggatgagatccccatctgcgcccgatatgagctgaacgggcaggagaccgacgcgttccccttccccgccgtgctgccggacgccaagcccgtcatgactgccatgcccggctggaagtgcgacatctccggcgtccggaagtgggagaacctgccggaggcggcccggaactatgtggaatacgtggagcgggagatcggctgccatatcacctatgtgtctgtgggaccggaaagagattccatcatcattcggtgaggaggaaatccgatgctgtttgccgtattcgggtggatcgcgttggcaggtgccctctgctggccgtttctcctttaccggatcatttcaaaagcatcgaaggatcgttccgcgggtgtcgagtgtttcctgttggcactgctcagcctggatttttgtctctggctgtttacagtttttaccgcactccctgcttcataaatgcttcgcctccggcgaaacagatcgtaccctctggaggcacccatgccggtgcctcctaaacttttgagcgaaagaaaggtggacctcttatgtccaaagaacgttacgaatccccctggcgtcccggtacgcctcggcgttcatgctgcacctgttctcccccgacatgcgctttgagacctggaggcggctgtgggtggccctggcccgggccgagcgcaatctgggcctgcccgtcaccgcggagcaggtggcggagctggaggcccacatcaccgacatcgactatgagacggcttcggcgcgggagaaggaggtccgccacgacgtgatggcccacgtctacacctacggcaaggcggccccctccgccgcggggatcatccacctgggggccaccagctgctatgtcaccgacaacgcggatctcatcatctaccgggagggcctgcggtatctccggggagagctgctggctgtggtggcgaacctcagtaaatttgcagagcaatacaaggccacccccaccctgggctatacccactatcagcccgcccagctggtgacggtgggcaagcgggccaccctctggatgcaggacctgctctccgacctggaggagctggacttcgtcctggaccacatgaagttcctgggctgccggggcaccaccggcacagaggccagctttatggacctgttcgatggagacggcgccaagattgacgagatgaaccggcagatcgccgcagaattcggttttgagcagtgttatgccgtctgtggccagacctatcccagaaaggcggacagccgcatcctgaactgcctctccgccattgcccagagctgctaccgcatggccaacgacatccgccttctccagcacgaccggcaggtggaggagccctttgagaagaaccagatcggctcctctgccatggcctacaagcgcaatcccatgcggtccgagcggatctgctctctcagccgctacctgatggcggacgccatgaacgcccccatgaccgcctccgtccagtggttggagcggaccctggacgactccgccaaccgccgcatctccatgccagagggcttcctctgcgccgacgccatcctgcgtctcagtcagaacgtcaccgacgggctccacgtcaacgagaagatcgtggaccggacctgccgggagtacctgcccttcattgctacggagaacctgatgatggagggcgtcaagcggggcggcgaccggcaggcgctccacgagatcatccgcacctgctccatggccgccaccgcccggatgaaggagggggagccctgcgacctgctctcccgcctggcggcggagcctgccttcggcatgaccgaggcggagatggaggccgtgctggacccgaagctgtacatcggccgctgtccggagcaggtggacgccttcctggcccaggtgaggcccctgctctccggcgccagccgggaagtcccggagatcagtctctgaccgtttcataccgtccgggcgccctgcccgccgtgcctgcggcgggaggggcgccggaacgcttttcaggcggaaccccttcggctgtcccggagcggaggagccgggaaggctgccggaaatggaatgccgattttgtgggttttgacgttgacagtgcgctgctggcggtgatacactgctaccatcgctttcgagatcgaggccaaatccaaccatcagaaggcattgatggagaaaaggatcgtggaaattccggttcagtgagcgggggcagtgggaagcccgtacaaagagtccgcgggaagaagactctgcagctgcattccgaacgcggatctccgctagtaagtgcgacgagttgtgatcgttatctcacacgggcttgttggagctttgaaagggatcccatcatgggagcaaattaggtggtaccgcggatcgcagctattcatcctaagattttaggagaaagctgcgttctttgttatacgctccatagcaaagagtgctctgcgccagtaccctgccctttgggcagtcggcggctgatgcgcaaattcatccgggaggcgcttctgcccatgtgcggggccatggttttttcaaaagatctgtaccaaggaagagctgctgcccctcttcggccggacgtattttgactttgagacgctgcggaggaagggcggccgtcgtccgccctttaccaaggtgagcctgctggaccgggagatcttcgggcaacaccattccggccggaactggatgcttcgggacttccggatgcccaaccggtcctgggggatgcgacgcggacggcctctgtgcccggggcccctccgatgacggcgagagcggcaaatgaggcggaaaatccgcatttcctgttgagttttccatatctgatgtgatacgatacattttataaatacaggaggatgaaacgcatgagtaccaccacgaaactctccgatctgttcggcagcatggtcttcaatgaggacaccatgaaggagcgcctgtcctctgcgtcctatgaggcgtggaagaagtgcgttacagacggaacgtctttggatatctccaccgccaatgagatcgcccaggccatgaagcagtgggccgtggaaaagggcgccacccactacacccactggttccagcccatgaccggcgtcacggcggagaagcacgacagcttcattgcccctgccggcggcggcaagatcctcatggaattctccggaaaagagctggtccggggtgagccggatgcctcctccttcccctccggcggtctgcgggccacctttgaggcccggggctacaccgcctgggatcccacctcgtttgccttcatcaaggagggtagcctctgcatccccaccatcttctgctcctactccggcgaggccctggacaagaagacgcctcttctgcggtccatggacgagatcagccgccaggcggtgcgaatcctgcgcctgttcggggacacgacgaccaaacgggtggtggttcaggtggggccggagcaggagtacttcctggtggacaaggcccagtacgcccagcgggaggacctgcggatgtgcggccggaccctgttcggcgcaaagcccccaagggacaggagctggacgaccactactatggcgccatccggccccgggtcgccgcctatatgaaggatctggatgaggagctgtggaagctgggcgtgctcagcaaaaccaagcacaacgaggtggccccctcccagcatgagatggccccgatctacaccaacgccaacgccgcctgcgaccagaaccagctggtgatggagatgatgaagaaggtggccgaccgccacggactggtgtgcctgctccatgagaagcccttcgcgggcgtcaacggctccggcaagcacgacaactggtccctctccaccgacacgggcaaaaatctgttcaagcccggctccaccccccggcagaacgcccagttcctgctgtttttggcggccttcatcaagggtgtggacgactatcaggagttcctgcgggccacggtggccttccccggcaacgaccaccggctgggcgcccaggaggcaccgcccgccgtgctctccatcttcctgggagacgagctctccgctgtggtggactccatcatcaacgacacggacttccagagcaccggcaagcggacgctggagatcggcgtggacgccctgcctgccatccgccaggacaacacggatcggaaccgcacctcccccatggcctttaccggcaacaagttcgagttccggatgctgggcgcatcccagtccatctccggccccaatatcgccctgaacaccatcatggccgaggagctgaaacagttcgcggacgagctggaggcatcccgggacttccaggcggacctgcccaagctgatccgccgggtattcaccgagcatcagcggatcatcttcaacggcaacggctatgacgaggcctggctggaggaggccaaaaagcgcggcctttccaacctgacctccaccgctgacgctctgcccatgtacaccgctcccaaaaacgtggatctgtttgtcaagcacggcatctacaccaaggaggaaatcgaggcccgggcggagatccacattgagaactacaccacggtcctgaccattgaggccaagactatggcggacatgatccgccaccagatcctgcctgcggtgtccgactacgccgaccagctgtgccagcgggcctatcacaaggacgccatgggtgtgccccaccagtatgagacttccacagccatgcagatcggcaccctgacggacgccctgcaggcggactgcgccaagctggaggcggatctggccgctatccccgtgggctctatcaaggccatgaactactgccatgaggtgctgatccccgacatggcagaggcccggaaggccgccgaccagttggagacgctgactgcctccaagtcctggcctttcccggtatacagcgacctgctgttctacgtataaagtgcgcaagagggccccggccatcggccggggccctcttggattcatctgttacaccagcacgtcgaagaacagcgccaaaatagtggtggcgaggccgcagaggccgatggcaaggccgctcatggccccctccgtctcccccagctccagggcgcgggcggtgcccatggcgtggctgcaggcgccgatggccagccctgccgccaccggatccttcacccggaagaggcgtgccagcgcgggggcgcacaggttgcccaggatgccggtgaagatcaccgccgccacggtgatggagacaatgccgccctgcccctccgcaatggcggtggcgatgggtgtggtgacggacttgggcaggagggagacggtcagtgtccggtccaggccgaacaggcggcacaggccccagatgctgaggaccgaagtcaccgccccggccgcgcatcccgccaggatgggcagcaggttctttttcagcaggtcgatctgggcgtagatggttactgccaggcagaccgtggccggccccagaaagaggttgatgaggctgccgccggcgttgtacgctgcatagggaatgtcaaacaccgccagcaccgcgataatcatcatcaccgccagcaccaggccgttgcagatcacaagcccggtccgcttctggattttgcagcctgcccagtaagccaggatcgtcagcgtcaccccgaaaaagggggactcccacagcgcgctcatctccgcttccccctctccagcaggcggcaggtgagccgcaccgctcccactgtagcggcaaaggtggcaatcagcgagaccgcgcagacgaccaccagggcaagcaggttctcccgtaacacatctgcatagttgatgatgctgacactggccgggatgaagaagaaggggagattccccagcaggtagtccgacttctcccggatgtgttctgtcttgatgacgcgtgccagcagcagcgccagaagcagcagcatcccgatgatgctggcaggcagggtgaagggcaacacccgctcaatacaggtgctgatccagcagatgccgaagatgatgccgatctgcgttagaagtttcaaagtgaaccgcctctcccggcggtcccccgccgcgttactctgcgccgtattcacacaagggcgcggattcttttcaacttttttattctacggagacggccggggaatgtcaaatccttccggctcctttttctgccgccgccgcaaaattcggcaaaacagtacaaggccccgccgggaaagagcgggaccttgtccaggtcatccaagcatccgcaggaggccgggggactcagaggggcatttgccgctccagctcccggcggaagtccgggtgggcgatggcaatcagcgcccgggcccgctccacggtgctcttgtatttcagatccgccacgccgaactccgtcaccacatactggacgcaggtgcgggggtggtcaccacgctgccgggggccagctgcggcacgattttggagtggaggacccccgccttgtcccggtagctggaccggagggccaggatactctttccgcccttggaccactgggagcctaccacccactccagctgtccgccggtgccggagtactgccgggggccgatactctcggcattcacctggccggtgaggtcgatctccatggcgttgttgatggagaccacatggtcgttccgggcgatgttccgggcatcgttcacccagtcgatctccttctggcagaaggcgggattctcatgggcgaaggcccacagctccggcccgcccaccatgttggcgtatacgctccgccccgggcaggtctgtttgcggctgttgttcaccacgccccggcgcatcagctccatgacgccggtgctcaggatctctgtgtggacgcccagatcccgctttcccgcatgggccagacactcgcccacggtattggccagccctcccagccccagctggatgcaggcgccgtctggcactagatccgcgatgtagcccgcgatgcggctgtccgtctcgtttcccgctgcgatgggcgtctctaccagaggacggctggattcgatgatcccgtccacctctgatacatggatgcgggtgtgggcctccccatcactgggaatattgggcattcgggggttcacctccgccagcaccagctcgcactgctccagcaccttccggctcagggccgtgccccacagggagcggctcatccacccgttctcatccgggagcgagcaggtcagcgccgccacccgggggcgccgggccaggagccacgcgggcgtctgactcaggttggagggggcgtaatggacgttgcccatgggctccaggccccgctccacgccgtaaaagttggagtcataagtcacctgtccggccagctccggcgtcagcagccgggtcccggcggggatgaagtgcccgtagatggcgatatggccgccggtctccagcaggcgctccgccagcgccccgtccagctcccagggccagttggacatggcggcgaaggccgccgtgtccccgtcccggatcagctccgccgcctcccgggcggtcatctgcagggcctgatactgggtctgccagttgcccgctcccgcgcagcgtccccggcggatgggtgtcagttctgtcatcgtcattctcctttgccgcgcccctctgcggggcggtgtctccggcggtttgtacagcccgccgtgggggccgcggccgccggttccctttcccgtctattgtaccgcacattccgcttccgcacaatcctcttttccgcggacgagttaatagaaattttgtttttttctgcttgcgcccggccgcttcgccgtgctatactggcgttgttcttgattttttccatggaggtgcatcttgcagaaacgcagtcacaaactgctggccgccaccctgctggagaatacccagggatttcaggccagacgattcgagctcgccttcctgttcggctcctttcagccggactgcaaccccctgacctatttgaagggctccctgcgggcctataagttccgggggcataactactccaactcccagcactacatctactcccgcatctcccggctccagcgccgccagcgctggaccatctggcagtattacaccctgggcaaactgacccactatctggcggatgcgttcacctatccccataacgagaattatcccgacagtatgctctgccaccaccagtatgagacggacctgcgggcctatctggaggagtatctggccacccgcgcccttcgtcgggagaagttccgtcaggacgtggcggacgcccttcaggagctgcaccggcagtacatggccggcgtggccgatatgcgcaaggatgtgcagttcatcctgaaggccacctccctgctgatggccggctgcctgcctgccagcgccgcagcggctgtctgaaccctgttttgggaaaagcgcacagcagcggtttccctttcggcgcattctttggaatcattgtcaatttccatttgctttttctggtgttatcctgaaactatcaaaggactcggaaaggaacccagtcatgaccaacatcacccgttctgccgaataccgttactttagctttacctatttttatggtaaggcttatttcggtttggctgaaaatgtgtgtgatcgtgtctgacgccaggaaaaggctatcagtgcatgacgacccgcagccgaaccggctgcgggtcttttttgtaccagccccatcatttttaggaggaatacagtatgatcgtcgttctgaaacaaaaccccaaccggcaccagctggagagcctgatcgcctggctccaggaaaaggggatcatcatccacaccagcatcggcgaggcccacaccatcttaggactggtgggtgataccagccagctggacatcgacctgattgccgccctggacatcgtggaggatgtgaaacgggtccaggagccctacaagaatgccaaccggaagttccacccggaggacacggtggtgcaggtgggcaacacccagatcggcggcggcaatctgaccctgatggcgggtccctgctctgtggagagcgaggagcaggtggtggccattgccaaagcggtgaaggccagcggcgccaccatgctgcgggggggcgccttcaagccccggacctccccctactccttccagggcctgggggccacgggtttggagtacctgaaggtggcccggcaggagaccggcctccccatcgtgacggagctgatggacctgagccagctgcccctcttcaaggatgtggacgtgatccagatcggcgcccggaacatgcagaacttcgacctactcaaggccgtaggccatcaggacaaacccgtcatgatcaaacggggcatgtccgccacctacgaggagtggctgatgagcgccgagtacgtcatggccggcggcaatgagaatgtgatcctctgcgagcgaggtatccgcacctttgagagctacacccgcaacaccctggatctggcctgcatccccgtgctgcggaagctgacccacctgcccatcatcatcgatcccagccatgccaccggcaagagctggctggtagatcccctggccatgggcgccgtggctaccggtgccgacggattgctgatcgaggtccacaacgacccggcccatgccctgtgcgatggcccccagtccctgaagccggaggtgttcgacggcctggcgaagaagctgctgaagctccatgactttatgaagacggtggaggagtaagacatgaatgttgccatcgtcggcctgggcctcatcggcgggtccatggccaagagcatcaagaaccgcaccagccacaccgtctggggcatagacctgaacgcggagaccatgaccatggcccggatgtgcggcgccatcgacgcccccctgacggaggagaacctgccccaggcggatctgatcctggtggcgatccggcccggcgccgccatcgagtgggtccggcagcacgcgccgcagatcgccaagtccgccattctggtggacctgtgcggcgtgaagcggaccgtggtggcggccatcgcccccatcgcagaggaacgcggcttctcctatatcggcggccaccccatggccggtaaggagcggggcggcttcaccgcctccgcagaggacctgtacgtgggagcatctatgatcctgacgccggacaagcggacggacatgcggctgctggagacgctgaaggccttctttctggacctgggctttgcgggcctcaccttctcaacgccggaggagcacgaccgcatcatcgcctttacttcccagctggcccatatcgtctccagcgcctatgtgaagtcgccggaggcccagaagcgccgaggcttttccgccggcagctttcaggatatgacccgggtggcccgtctggatgaggacatgtggacagagctgtttctggacgatgaggacttcctcaccgccgagctggaagagctgatcggccacctgacggactaccgcaacgccttgcgggccaaggatactcagcggctgcacgatttgctgaaggagggccgggagctgaaggccaccgccggcggcaactgacctatttccggcgccgctgcgcgacatgattctataaaaggagtttttcgatgtttgactccatccgaaccattcccgtccgggtccggccgccctatgatgtgcgcattggcagcggcctgcttggccggtgcggggactatctggccgcgctgctgggacagcggaggatcgccgttctggccgacgacaccgtggcctccctgtacctggacaccgtcaccgccgctctggaggacgcgggctttgccgtctgctcccatatcttcccctccggggaggggcgcaagaatctctccaccctgacagagctactggagttcctggcgtcggagcatctgacccgcacggactgcgtggccgccctgggcggcggcgtcactggggacatggcgggctttgctgccgccgtgtacctccggggcatccggtatgtccagctgcccaccaccctgctggcggcggtggactcctccgtggggggtaagaccgccgtggacctgaccgccgggaagaacctggccggggccttctgccagcctgccgccgtgatctgcgacacggactgcctgaagaccctgccccccgacgtgtttgccgacggggccgccgaggccgtcaagaccggcgtgctctctgacgaagccctgttcgccctgtttgaggacggcaccctcaccgccgaccccggcgaggtcatcgcccggtgcgtcgcctacaaggccggcgtggtggagcgggacgagaaggagcagggggagcggaagcttttgaacctgggccatactgtgggccacgccatcgagaagtgcagcggctatgttatcccccatggccacgccgtggcggcggggctggccgtcatcgcccgggctgcggaggccctgggctggacggaggagtccctggcggcgcgaatcaccgcctgcctttctaaaaatggcctgcccaccgggacagactactctgctgaagccctggcggaggcagccctttccgacaagaagcgcgccggtggggatatcaccctggtggtcccccggaagatcggccattgcgagctgcggaaggtcccggtagcggacctgctgcccatcatccgggcaggactggaggcgtaaatggaccttcaaatcaccccgaaaaaactctccggcgccgtgacgccgccctccagcaagtctcaggcccaccgattgctgatcgccgctgctctcagcggcgggatcagcgtcatccacggcctggcggactcccaggacatccgggccacccgccggtgcctgtctgccatgtgtgccgggatggaggatctgccggatggcaccctccgggtccacggactgggaaacggcatcgtcatcgcacctccctatgccctgctggactgcggggaatcgggctctaccctgcgcttcctgatccccgtgggcctgctgatacagggagaggcgtccttcaccggccgaggccggctgatggagcgcccgctgaagccctacgaggacctgttccgggagaagggcatcgcctggaagctggcggacaacgtcctcaccgtaaacggcggtcggggatacggtaccctggccctggacccggggacataccgcctgcccggcaacgtatccagccagttcttcacagggctgctgttcgtcatgcccctgctggagggagactctaccctggtgtccaccacacccctggagagccgggactacctggagatgacccggcaggctcaggccgctgccggtgtcaccagccggtggctggacgaaaacacgctcttcgtccctggcggccagacctaccagtcctttgaggccacggcggaggcggactggtcccaggcggggttctggtacgccgccgatttcctggacagccgtgtggacatccggggcctgaatcccgactctgcgcagggggacaaggcagtcagcgaactttactggcggctggcccggccgggggacacggagatcgatgtctccggatgccccgacctgctgccgcctctggcggtgatggcggcggcccgctccggtaccacccggtttgtgaacgctgcccggctgcggatgaaggagagcgaccggctttccaccaccgccgccctgctgaccgccctgggcggacgggcggaggaggggccggactttctgacagtccacggcgggacgctcaccggcggcatggtggactgcgccaacgaccaccggatcgccatggcggccgccatcgccgccaccgcctgtaccggccccgtcacggtgctgggggcccaatgcgtgcagaagtcctacccggatttctgggaggtgtacaagaacctgggaggtgatatccatgtcctctgaattcggcagtctcctgaaaatctctgtcttcggccaatcccatggaagggccatcggcgtggtggtggatggcctgcccgccggggaggccatcgacctggaggagctgaacgccttcctggcccggcggaagccggggaagagccacctttccaccgcccggagggaggccgacgcgccggtgttcctctccggcctggaaaacggcgtcacctgtggagcccctctgtgcgcggtcatcgaaaatggagaccagcactcatcggactatgatgccctgcaggacaagccccggcccggccacgcagactacactgcatttgtcaagtggggcgggcaggcggacatgcggggcggcggccacttctccggccggctgacggcgcccctgtgtatcgccggcggcatcgccaagcagattctctcccgccggggcgtatacgtaggggcccacctccagtccgtggggacggtggcggatgcattattccccctgcggcccacgaaggagctgtttgacgccgtggctgccaagccattcccggtgctggacgaccaggcgggggagcggatgcaggcgctgattctggaggcctggaaaaatctggattctgtgggaggcgtcgttgagtgtgccgccacgggccttcccgccggactgggggagcccatgttcggcggcgtggaaaaccggctggccgccgccctcttcggcattcccgccgtgaagggcgtggagtttggggacggcttcgccgccgcccggtcccgggggtccgaaaacaacgacccctttgtgatggaggacggccgggtgcagacgcagaccaaccacgcgggcggcattctggggggcatcaccagcggaatgcccatcgtcctgcggacggccatgaagcccacaccgtccatcgcccagccccagcggacggtcagcctgtccgccggagagaatgcggagcttgtgattcacgggcggcacgacccctgcattgcccaccgggcggtcccggtggtggaggcggttactgccgccgtgctgttagatttattattggagggacatcatggaactttctgagattcgagagaagatcgacgcagtggacgagcagctgctggacctgttcctgcagcgcatggacctgtccgacgaggtggctgcctacaagaatgcgcaccatctgcccattttgaacaaagaacgggagcgggccatcctggccaaggtgacggagaaatccggggagcgggagcggtatgcctaccacctgttctccaccctgttcgagctggcccggtcccggcaggcagagctgatctccgcccccaccaaggtggccgcccaagtccgcgcctctctggaggccggtacctcggtctttccccagacgggcctggtggcctgtcagggcgtggagggggccaactcccaggtggcctgtgaccggctgctgccccggggcaacatcgtgtatgtgaagaccttccaggctgtggtgtccgctgtggagtccggcctgtgcaggttcggtgtgctgcccattgagaacagctccaacggctccgtccgggcggtgtacgagctgctgcaggaccacaacctctccatcgtccggtccacccggctgtgcatccggcacgagttgctgacgctgcccggcgtgaagatggaggacatcacggagatctactcccacgagcaggccatcggccagtgcagcaagttcctgaacagcctcaacggcgtccgtgtcatcccctgcgacaacaccgccatggccgccaagatggtggcggagaagggcgaccgccacgccgccgccatttcctcccacccctgcgcggcgttgtacggcctgacctgcctcaacgacagcatccaggacagcgacaacaactacacccggttcatctgcatcaccaaggatccggtgatctatgccggcgccaaccggatcagcctgattatcgcctttgacaaccggcccggcgccctgtatgaaatcctctccaagctggcggcactggacatcaacatgacgaagctggagtcctgccccgtggcgggaagtgactttgagtttgttttcttcctggagctggacgcctccgtccaggatcccagcgtcctggccatgctggaggagatggagcgcagctgtgccgagttccagttcttgggcaactacgcggaagtctgagccatggatgagcggatttacggcctgctgggccggaagctgggccacagctggtccgtccccatccatgccgccctgggcaacggcgcctaccgccttctcgagctggagccggatggactggctccctttcttcaccggaaggacatcggcggcctgaacgtcaccatcccctacaagcgggacgtgatgcccctgtgcgatgagatcgacccggcggcggaggccatcggcagcgtcaacaccatcgtccggtgcgcagacggcaagctggtgggctataatacggacatcgacgggttcctctatatggcctgccgggcgggtatctccctgtcagggaaaaaagtcgtgattttgggcagcggcggggcgtctctgacggcccagaccgccgcccggcaggggggcgcggcggaggttgtggtggtatcccgtttcggtccggacaactatgacaacctctctcgccacgctgacgcggagatcctggtgaacgccactccggtgggcatgtaccccggcaacggccagtctcccgtggacctgtccgtatttccggtctgtcagggggtgctggacgtcatctacaatccccggcgcacggccctgctgctgcaggcggaggcgcggagcatcccctgctctgacggactgcccatgctggtggcccaggcggtggcggcagaggagcggttcttcaacaggtccattcccgccggtgagaatgagcggattttggttcagctccggcgggagatgaccaacctcatcctgatcggcatgcccggcagtggcaagaccacggtgggggaggcgctctcccgcctcaccggccgggaggccgtggatctggaccagatgatcgaaaccaccgccggctgttccatcccggagatcttccagcgtgaaggcgagtccggcttccgggcccgggagcgggccgccgcggaggaggctgggaagcgcacaggcgtcatcctcctcaccggcggcggtatcatcaagacggcggaaaactacgcggccctccatcagaacggccgcatctatcagctggtgcgggatctcagcctgctgcccaccgagggccggcccctgtcccagggggcggatctggccgccatgtggcgggagcgggcgcccctgtacgcccgattccgggacgtggagattgacaacagcggcacggtggaggacaccgccgccgctatctggagggatttttgtgcacattctggtagttaacggccccaatatgaacatgctgggaatccgccagccggagatctacggccatgagacctatgaggacctgaaggcgctgatccgggcggaggcggaccggctgggcgcgtccgtctccttcttccagtccaaccacgagggggccctggtggacgccatccagcaggcatacttcgaccatgtggacggcatcatcatcaacccggcagcctacacccacaccagtgtggccctgctggatgccgtgaaggcggtggggatccccacggtggaggtccacgtctccgacccggacagccgggaggagttccgccgtgtctcctacatccgggccgcctgcgcggccaccatccggggccatgggctccagggatatgtggaggccctgcggtttctctgcggcgcggacgcttgacaaacggcggtctctgacggataatatgcccataccccattgggtatccgggaggtgtcggcatgagacaatgtatggatgcggacaacctgcaccggcggctgaagaagatcgtcggccaggtgcaggccattgaccgcatggtagacgaggacgtgccctgtgaggatgtgctgtcccagatcaacgccgccaagtccgccctccacaagtgcgggcaggtggtgctggaggggcacatccagcactgtgtccgggacggcatccagcacggggatgcggacaagaccatcgagagcttcaccaaggcggtggagcggttctccaacatgggttgaaggcaaggggatcggctgaaaagccgatcccctttgtatatgttacaggattttctccagagcgtaattggtcaatacctgtccgcggcagggcacctgctgttcccgctctatcgcatagccccggccgaggaagaagggcagggcggtcttggaggcgtggacagtgacggcgtccaccccaattcccggcagtgggcctccagcgcgtcacacagggctgcggcgatgccctgtccctggcagtcccaccggacgaacaggtggtccagataaccggtatcctccacattgccgtagcccacaatccgcccgcccgcctctgctaccagggtgtacagccgctgaaaccagctgtcccgtgtcagcagatccgcctctccggcggcccaggcttccacctggggcagggtgtagtcccggcagttcacctgccgaaccgtctcaccgaacaggcgggccagaatgggcaggtcttctgtccggtagcgccgtagtcgcatttctgttctctccttcctgttttgtggtcattttacaggaagaatctgtgtgccgcaaggtattttgcctgaaaacggcggcactttttcttgacaggcatacccctatgggtataatatacatatacccccataggtataaagagaggatgtgagccatttgatccatactctggagcgatttctggagtggggcggcgtgaagaaggccgtgacctgcctggtcttctccggcatcgccctgcttgtcagcatcttcgacctgctgccgcagctgccctttgacgccgcctgggcagctgtcgtcctctgcggtatccccatcatcttggaggcagtcatcggcctggtgacagcctttgacatcaaggcggacgtgctggtgtccatcgccttgattgcctccctcatcattggggaggacttcgccgccggcgaggtggccttcatcatgcagctgggcgccctgctggaggatctcacggtggcccgggcgcgggccggcatcgagaagctggtgcatctgacgccccagaccgcccgccgcctcaccggcggccgggaggaggccattcccgccgagcaggtggctgtgggcgacgtgctccgggtgctgccgggcgagaccgtgccagtggacggagagattctcaccggacagacctccatcaaccaggcggtgatgaccggcgagcccctgcctgtggacaaggggcccggagacgaggtttccagcggcacggtgaaccagttcggcgccttcgagatgcgggcgacgaaggtgggggaggacagttctatccagcggatgatccggctggtccagtccgccgatgccggcaaggccaggatcgtggggctggcagaccgctgggccacctggatcgtagtggcggccctgaccgccgccgccttgacgggcctcatcacccgggatcccatccgagcggtgaccattctggtggtattctgcccctgtgccctggtgctggccactcccactgccatcatggccgccatcggcaacgccaccaggcacagctttctggtgcgggagggagacgctctggaacggctggcctccgtctcccaggtgacctttgacaaaacaggcactctgaccctcggcaccccccaggtgaagctggtggagagcctgctgccggacgtatcccgggacgcgctctacgcctggactgcgggggcggagctccggtccgagcacccgttgggccgtgccgttgttcagggctggcgagccgagaccgtcgcggcgccgccggagacagcggacttccagatgctccccggccggggtgtttctgccactgtggcgggtcatcacctcgtcgccggtaaccgggagctgctgacagaggaacatgtcccctgggaatccttgtcccaggctgccgtccctgccctggagcagggctgcaccgtcatctatgtggcggtagacggccgcccggcgggctttctggccctggcagacaccctgcggccggacgccgccgggaccatccgggatgtccgggccaccggcgtgaccccggtgctgctcaccggcgaccacgagagggccgcccggcatattgccggagagctgggcatcggcaccttccaggcggagtgcctgccggaggataagctaacctggatcgaccgcagccagcagagcggccatctggtctgcatggtgggggacggcatcaacgacgctccagccctgaagcgggcccatgtgggcattgccatgggcggcgtgggcagcgacatcgctgtggacgccgcggacatcgccctggtaaacgacgacatccgggagctgccccatctgctggcactctccaagcggatgatgcgcaccatcaagagcaatctggccttctccatgaccttgaacttcatcgccatcgccctggctatcaccggtatcctgaacccggtggtgggcgccctggtccacaacgccgggtccgtgctggtgattgtcaactcctctctgctgctgaagtggcggaagcgcccgtgacagcggcaggccatgggacagaagattctgcgccctcctacagcaaaaagcccccggcctctgccgggggctttttaagtcctggcttctcaccccttcagggtgttcagcaggtgccggatgtgaatgctcatggcgtggcgggcgccagcctcgtcccgctgcatcagaaagtccagaatcatgtagttgtccgcgatggcgatgctctgcatgtgcgcccgatttacggagacctgcaggatctcgttcaccgcgccgttgatgatcgggtacagccgccgcatatattcgttgtgggaggccttgatgatggccatgtggaactcctggtccgccaggggccagtctccgcccgcctttgcgatgcgctccatccgctccgctttctggcggatctgcgccagttcttcgtctgtggcacgctgacaggccagcgccacggtggcgggctcaaagatcagccgcatttcaaacaggtccctggcccggacccgggaccgcaggttggacagcgccgtcagatccaccgcgctggcgggcagatcctccgtgacaaacgtgcccttgccccggcggatctccaacacgccctgggccaccagaaaggagatggcctcccggagcgtggtgcggctgacgtgcagcgcctcactgagttcgttttcattcgggagcttgctccccggcgtgaactgccgttcgtccatgattagctcgcacagccggtcggccgtccgctccgacaatttgactttccgtccctcacccatgcgcatccctccatcatccgtggtgaggtcaggcatttctccactggattttccggccagtacggaaatgtccttgacatcatatctcttttagagtacaatgacatcatacaacaaatgaaaaaataatacaactattttgtgaaaaaatgaggtgaaccgcttgtgacggccaaggacatgttttcccaccgcgtctcgatcctcaccggccactacggcaccggaaagacggaggtctccgtcaatctggccctggcgctggccgctgagggggaacaggtaatgctggcggatctggatatcgtcaacccctatttccgctctcgggagcggcggcccctcctggaaaaagccggtgtgcgggtgatttcctcctcccaggcctgttcggacgcggatgtccccgccctgccggcggagctgctgaccattctggagaaccgggagatccggggcatcctggatatcggcggcgatccggtgggcgcccgggtgctggcccggtttcagcccaagatcgtacaggaggattaccagctgatcttcgtcctcaacgccaaccggccggaggtgcgggatgcggagagcgccgccgcctacctccgctccattgaggccgtcaccggcctcacctgctcgggcctggtgaacaacacccatctgtgcggcgagaccacgccggccgaaatccgcaagggcgccgccctggcacaagaggtttcccggcagaccggaatcccgatcctctgccacacggcggagcggcggttcttagaatccttgtcagacctgggggaacccgtgttccccattgccatcaatatgaaaaagccgtgggagcgctgactccgcggcaggaaaaaaggaggcatcctgcaaccatgacagcaaaggtaaccttcaactctgaccggtgcaagggctgtgagctgtgcaccactgtgtgcccgaagcacatcgtcgccatcgatcaggccgtcatcaaccggaaggggtatcaccccgcccatgtgacggacatcagccagtgcattgcatgcgccagctgcgcgaagatctgcccggactccatcatcactgtggaaaaattctgagaaggaggtcatcgaccgtggaaaaagaactttggaaaggaaatgaagccatcgccgaggccgccatccgcgccggctgcgactgcttcttcggctatcccatcacgcctcagagcgaggtcccggagtatatgtccgcccatctgcccaaggcgggcggcgtgttcctgcagtctgagtctgaggttgcggccatcaacatggtgtacggcgccgccggcgccggcatgcgggccatgacctcttcctcctcccccggcatcagcctgaaacaggagggcattacatacatcgccggcgccgagctgccctgcgtcatcgtcaactgcatgcgcggcggtccgggcctgggcaccattcagcccggccagggcgattactatcaggccacccgcggcggcggcaacggcgattaccggacgctggtcctctccccctccaatgtgcaggaggcggtggacttcgtccaggaggcatttgacattgccgaccagtaccgcaaccccgtcatggtggttatggacggcctgattggccagatgatggagcccatcgagtggcgtcctgtccccaagcgggacctgcccccaaggactgggccaccaccggccgtaaggaccgggaccacaacaacatcatcaactccctgtacatggatccggaggagtgcgaccgtcacaacgaccatctggcggagaaatacgccctgatggagaagaacgaggtccgctggtccgagacggagtgcgaggacgccgagatcgtcatcaccgcctacggcacccctgcccggatcgccctcaccgcccttgagacgctgcgcgccgaggggctgaaggtgggcctgttccgtcccattaccctgtggcccttcccggaggaggccctgcgcaagctctccaaggccgaccacgtgaaggcatttttggatgtggagatgagctccaccggccagatgatcgacgatgtccgtctgtccgtggagggcagaaagcccatccattacctgggccacgccggcggcgtgatgcccaccgtggaagagatggtagaagcggccaagaaggccttgaaggagggcaagtgacatggcgatcgtatatgagaaatcccggggcctgacggacgtggagttccactactgccccggctgccaccacggcatcatccacaagctggtggcagagtcgctggtggagctgggtctgctggatgacgccatcggcgtgtgccccgtgggctgctccgtcttcgcgtacaagtatttcaactgcgacatgcaggaggccgcccacggccgggcgcctgccgtagctaccggcatcaagcgcacccatccccatcaggcggtgttcacctaccagggcgacggtgacttggcctccatcggcgcggcggagatcgtccacgccgccatgcggggcgagaagttcacgaccatctttgtcaacaatgccatctacggcatgaccggcggtcagatggcccccaccactctgatcggccagaaggccactacctgccaggagggccgcacccgggagcaggccggtatgcccatccgcatggcggagatgctctccaccctggacggctgcgcctatgccgagcgggtctgcgtcacggatatcgccaacatcaacaaggccaagaaggccatcaagaaggcattccagaagcagatgaacggcgagggcttcacctttatcgaggtgctgtccacctgccccaccaactggggcatgacgccgctgaaggccaatcagtggctgaaggacaacatggtcccctactatcctctgggtgtcatcaaggagacggccccggaaggcgcggaggtgaaatgagatgaaaaaagagatcgtcatttccggcttcggcggccagggcggcctggccatcggcaagaatctggcagaggccggcatggctgagggcctgaacgttacctgggctccttcctacggccccgagatgcgtggcggcaccgccaactgctctgtggtgctctccgacaagcccgtgggatctcccgtgttcgcccatcccaccgagctcatcgccctgaatgagccctccctggtcaagttcgaggagggcgttgtccccggcggcatggtattcgtcaacagcgacgtggtgacggataaagtctcccgcacggacctgacggcctactacatcccctgctcccagatcgccgacgaggtgggcaaccccaaggtcagcaacatggtgatgctgggcgcctatgtggccggcactaaggtgctgaaggcggagaccatcgagaagatgatccaggagatgttcaccggcgccaaggccaagttcgtccccctgaacatcgaggcgttccgccgcggcatggcctgcgtgcagtgatttgtttcagagggccggcgagtttgctcaccggccctctctctttggcgggccctgcgctttctgtgcattttaacagttgactttggctgtgtatcagcgtataaaagatatcatagaagaatatggctttatattgcgtggaacgggacacgccgcgaagatctctcccctcagagagctgccggacggtgcgaggcagcgggggcagctttgctggcctcccccgggagcagtgggcggaacagagctttcccagtacgccgcaccggacgccctccgttatcggggcagacgagcggccgctggaccagcggcaacgagagtggtaccacggaagtttgactttcgcctctcctgtgcagggcaggagtgcgcgaaagtctttttgctatcccccaaaacttcaaactatttttaaggagcgatcaatatgctggatattcaaatcaccaagaccaccagccccaaggccaagcccgcggacgagagcaagctgggcttcggcaagattttcaccgaccacatgttcgtcatggactatgcgccggacaagggctggcatgacgcccgcatcgtcccctatcagcccttccccctggatcccgcctgcgtgattttccactacgcgcaggagatctttgagggcctgaaggcctaccggaccgcggacaacaccatccagctgttccgccccgactgtaacggccagcggatgcaggactccgctgaccggatgtgcattcccaagatccctgtggaggacttcgtccaggccgtgaagaccctggtggaagtggacaaggactgggtgccccattctgacggcgcctccctgtatatccgtccctttgtattcgccaccgatgtgggcatgggcgtccacgccagccggaactacacgttctgcgtcatctgcgctccctccggcgcctactatgccgagggcatcgatcccgtccgcatctacgtggaggacgagtacatccgcgccgcgcccggcctgaccggcttcaccaagtgcggcggcaactacgccgcctccatcaaggccggcgagatggccgagcagcagggcttcgcccaggtgctgtggctggacggcgtggagaagaagtatgtggaagaggtcggctccatgaacattatgttcaagatcgacggcaagatctacaccgccccctgcaccggtacagtgctgcccggcgtcacccgccgctccatcatcgaactgctgaaggactggggctatgaggtctgcgaggagcacgtggccatcgccgacatcatgaaggccggccacgacggcaagctggaggaggtcttcggcaccggcaccgccgccgtcgtctcccccgtcaaggaactggactggaagggcgacaaggtcttcatcagcggcggcaagatcggcgagctgacgcagaagctgtacgacaccctcaccggcatccagtggggcaagctgcccgacaccaagggctggatcgtccccgtgtgcaagggctgagttcccatcgtcaaaaagagcggagccgaaaggctccgctcttttcctgcgtcccgctcagggctgctccgcttcataacgctttaaaatggcggccagagcctcagccgggatgtctcccacggggcggatcggctccggattttgatcgtagggggcgatgggcttttcaaaccaggccacatcccgccaggcgccgcacttgtacccagtgctgcggtaggtgcccagccgccggaagcccagggcttggtggagcccctcactcttttcattgggcacggtgacgcagccgtagaccgtgcggatgccctgcagccgcagaatgtctatcagggcgccgtacagccgccttcccagcccccgggaggtgcatgagcggtccagatagacggacagctccgcattccactgataggcggcccgctccgcctggcggtgggcgtaggcatagcccacgatccgccccttctccaggcatacgagatagggatactcccggccgacggcggcgatgcgtccggcaaattccgcctctgagggcagcgcacactcaaaggtgatgggagtgtccaggtattctccgtagatcttcagcagggcggcgctgtctgctggcgcggcaaagcggaacgccggcgctcccggggcttctctttcagccatctccgccgccccttacgtcctggcatgaatctgggcgccgcacttggggcaggtgatgacgattttccccttgcccaccggcacccggcagatggttttacagttcttgcaggtgaagtatttgtgggccttgtccgcatggcgggccttggcattctggcggctgctcttcatccgccacatccagttcacccaccgctggttttcgctccggcgcttggtgagattccgggagaagatgcggaacagggcgaaggcccaagcggcgatggacaccaggtacagcgcattccccagccacagatgatggggggccacaaacatggagacgaggtccagaaccagacttcccaccacaatggccaggctcaactggtccacgccgttgcgtccgtacatgagccgggccagtgcgttcccgattttttgaaagactcccatagataaggactccttttccggcggctcctgccgcagggtgtgattctgtcattattttacacgcaaacccaccgccgcacaaccgtttgcgggcggaatttacaaattggtcatttatttgttttgttcaaagtgctatactgatttctgttgagaaaaaacaccaaaggaagtgcaatatcatggcaaaacggcaattcaaggcggagtccaagcggctgctggacctgatggtcaactccatctacacccacaaggagatctttctccgggagatcatctccaatgccagcgacgcctgtgacaagctgtgctaccaggccctgacggatgacgccgtgggcatgagccgcaaggacttcaagatcgagatcaaggtggacaaggaacaccggactctgaccgtctccgacaacggcatcggcatggacaaggaggacctggagaacaacctgggcgtcatcgcctcctccggctcctacaagttcaagcaggaggtgggggacgacgccaaggacaccgacgtgatcggccagttcggcgtgggcttctactccgcctttatggtggcggaccacatcaccgtggtgacgaggaagtacggcgccgacgccgcctggatgtggcagtcctccggcgccgacggctacaccatcaccgaatgcgagcgggatgccgtgggcacggacatcatcatgcacatcaaggcggacaccgatgatgagaagtacagtgagttcctggagtcctggcggctccaagagctggtgcggaagtattccgactacatccgcttccccatccgaatggaggtctccaagacccgccggaaggagggtagccccgacgacaagccggagtacgagacgtatcaggaagaggagacgctgaactccatggtgcccatctggcagcggcgcaagtccagcgtgaagccggaggagtacaacaagttctatcgggacaagttccacgactacgccgacccccaaaaggtcatcgccgtgtccgccgagggcgccgtcacctacaaggcgctgctgttcatccccggtgccacgcccttcgactactacaccaaggagtacgagaagggactgcagctgtactccaacggcgtcctcatcatggacaagtgcgccgacctgctgccggagcacttccgcttcgtccggggggtggtggactctcccgacctgtccctgaacatctcccgggagctgctccagcacgaccggcagctgaaggtcatcgcggccaacctggagaagaagatcaagagcgagcttggtaagctgctgaaggacgaccgggagggctacgagaaattttggaagaactttggccggcagatcaaatacggcgtcgtcagcgaatacggcgcccacaaggacctgctgcaggatctgctgctgttctactcctccacggaaaagaagcccgtcaccctggcggagtatgtctcccggatgaaggaggagcagaagttcatctactacgcggccggcgagagcttggagaagatcgacaaactgccccagaccgagggcctgcgggagtccggcacggagatcctctacttcacggaggaggtggacgagttctgcgcccagatccttcacaccttccaggacaaggagttccgctctgtcctggaccaggagatcgaggagggtgccgagaagaaggccgaggaggccgcagacgcccacaaggccgtgttcgacttcgtcaaggagaccctgggagatcaggtgaaggaggtcaaggccagcgcccggctgaagtcccatcccgtgtgcctgacggcaggggagggcctgagctttgagatggagaagtatttccaggcggtccagccggacagcgccatccgcgccgagcggattctggagctgaatgtggagcacccagctttccaggccctggaggccgccgtgacagcggacccggagaaggccaaaaagtacgccacgctgctgtacgaccaggctctgctgatcgcaggtctgcccctggaggatccctccggctacactgatctggtgtgcgagctgatgaaataaaataccatgcgcaaaagcggtcccgggtaaaacccgggaccgcttgtttgatttgcttcaggacggatctctctgccatcccggcgttttttccatcgggtaggggcggccgccctcggccacccgagaagacagccgcgtggatcggtaccgccctcaccgccgctccaccagccgctggtagtgcttgtacagggcggaaaaccggccctgatagctgtggttccagggcttgcgcttgccgcagaagtggaggatggccgtgtggtccatcacccagtccatgtcccgctccccttggctcagcagcaggtagcggtcaaaccgccgggcgtcgtagttccacaggctgtcgtccacccccaggatctgtccgccgtacaggccgttgagcacgtcctggtccggcagcagcagaatgtcggcgtgctcccgggcatagtcgaagatgtcacccggccggacctcccgccgcatggcggacagatccatcactagtacgccggagttgtagtaggcctccgcctcatagttctccagccgcagccggttcaccgggtctgtgatgcccgccagcagcccggtgtgggtggcggcggccatcaggtctccctccaggtccgtatcatacagggcccggacgggattgattaccagaatgtccgggtccagatacagcacccggtccagagaacgcggcagcagctccgccgccagcagccggtagtacatggcccgggtccagtaccgggccaccggcgcgtcggcgaacaggtccgccggcacctccaacgggtggatgcgcccccgaccggcgcagagctcctccagtgccgcccagtcctccggcagcaggccgtctccgatggcgtaaatctcaaaggtctcgccaggatcattccgcagcagagagcccagcatcacccgcaggggcgggagatagttgcggtccagtgtcaccagaatgttcatgtggtcaagccctccgatccgttggtccgggccgtgtcccggtaataggccaccagcaggtccaccaccgtcccgtaggagcggatgccgtcctcttggccgtagcccttcaaaatcgtgtcgtacaccttctggctggcatccgccgcagccccctcgaaggatgcccagtaggcgttattagatgccagatccgccagcaccgtgtccggaaggctgtcccggatggcctgccaggccgccggatccgcctggtacagggcgttgcccaggtggatgtaccccatcagccagccggagtattcgtacaccggatcgccgctggtggtggaggccagcaccgccaggaagttgcactcctgctccgaggcgatgccccgctggtgggacagctcgtgggcgatggtggaggggatcaggcaggcgggggcgtccacgttgatgttggactccccggtgaaagcaaagtagacgccggtgaagttcatggcgctcatgaccctggagaagaacatccgcttgggcgctcggtcctcaaattccaggaaggggaacaggtcctccgcgccctggtagatgtccgtgctcccggcaaagatctcgttcagagacgcattgaacgtccccgcctcatcccggggcacctggtcggctgtctgcgccagattttccgcgaaccacgcggtcaccgccgtcagatccgggagcgatacctcctccgcccggatgccggaccggtcctggaaggtgtccgtgtaatagcacaccccccacagcaggcaggtagcggcgcagacgctcagcccggcgcagaccgcccccagaaccgcgctgtaagcccggcgcttccgccgccctctggccctgactaccgccgtgatgttccataccacataggccagcgcgaggacggccgccaggacatacagcacctccatcacagagaaggagacccgatagcacaggctgcccagagatctccggatcggggcggatacaaatcgctccagggcgttcatccagtcccggtgctcccgggcgatccagaaggccgccagcaggaccaggtccgccagcagccagatgtgcagtttttggtgggacttgaaaaatgtcatgctcactccgctgccgccagcagctggcgggtatagtcgtctttcgggtggtcgaagatgtcatccactgttccctgctccacgatgcggccttctttcatcaccagcacccggtcgcagagctggtacaccacattcaggtcgtgggagataaagagatagctgagatccagctcccgccgcagcgtccgcagcaggtccaggatctgggcctggatggtcacgtccagggcggacaccggctcgtcggcaatgaggaaccggggccgctggatcagcgctgcagcaatggacacccgctgccgctgtccgccggagagttccgccggttttgccgccagacactcctccggcagacccacccggtccagcatctcccgcacccggcgcttgcgctccggggcgtcatacttgccgtagacccgcagcggctcctccagggtccactccaccgaataggcggggttcagcgcgctgtacgggtcctgaaagatcatctggggccgcttggtgtagtgaatcacctgcccctggtcgggcttcacaatgcccaggatggtcctggccagggtggattttccggtgccggactcgcccaccagacccaggatttccccatggcgcacatcaaaggtcacgtcgcggaggacctcctgataggggccgcggcggaagagcccgcggtcccggtatccgctggtgacgtgccggacggagagcaccagctcctgttcgctcatggcgtctcctccttccggtgccgggtgggaatggcggcgatgagccgctgggtgtatgggtgccggggatggcggaacaccgtctcgatgtccccctcctccaccagcacgccccgctgcatcaccgccgtgcgggtgcagagcttccgcaccacgttcaggttgtgggagatgaacagcatggagatgccggactcccggttcagctttttcaaaagctccaaaatctgggcctggatggtcacgtccagggcggtggtgggctcatccagcagcagcagcttgggccgtgccacgacggccgcggcgatcatggcccgctgcagcatcccgccggagagctcgtggggatacttccgatacacgcccgccgggtccggcagctccactgctgccagggccgccagggcctggtcccgccgcgcctcccgggagaggtctgtgtggatacgcagcacctcctccacctgggggccgatacgcatcagggggtccatgcagctctgcggctcctggaacaccacgccgatctccctcccctggacctgccgcagcagcgtgcggtctgcgtggagcagctccgcgccgtccagcaggatctccccggaaaagtcgcactgctttcggggcagcagtcccgccacgctcatggcggtgacagacttgccggagccggactcgcccaccagccccaggatctccccgtcgtggatggtcagggacacgcccgccacggcctcccgctgccgggtgtggaatttcacatgcagatctcggatctccagcatcaggacacccccccgttccggcgctgcaggccctcgccgatgagacccacgccgaagatcagcagcacgatggcgccgccggaacccagggcataccagggggcgctggtcagcatcccctgcgcctccgagagcatgtagcccagggaggcgtccggcggcgtgacgccgatgcccagatagctcatggaggcctccgccagcaccgcgttgttgaagccgatggtgatggccggcagcagcacctgcgtggtgttgggcaggatctgccgcaccaggatgcggccgctggaggcccccatcagccgggcgctcttcacataattcacgtcccgcagcgccgcgaaggcggtgcgggtcacccgggcaaagctggggatgaacacgatccccagggcgatcaccacgttgtatttattccccggccccaggatgctgatgagaaccagggccagcaggatgctgggaaaggcggtcagcgcgtcattcaggcgcatcaggacctcgtccaccacgccgccgaaatagcccgtgagggcgcccgctgccgtgccgcacaccgcgccgatggccacggtgctcagggcgatcaggaaggtggtgcccgccccctgcagcacccggctgaagatgtcccggccgaagctgtcggtccccagccagtgggccagggaggggccctccagcttgggccctgccagcagggcgtccgggtcgtagggcgtccacaccaggccgaccaggatcagcgccgccatgaggccggtgacaatcagcccggccagcaggtatccgttcatccgccgcttcatgacgcacctcccagccgcaggcgggggtcgatccgctggttgacaatgtctgccacggtgcctgccagcaccacccagaaggccaggatcaccacgatggcctgcaccacggggtagtcccggttggagatggaggccaccagcagccgtcccagccccgggatggcaaacacctgctccaccacgatgccagccgccacgatctccgccatggtctgggccaggaaggtcaccaccggcaccagggcgttgcgcagcacatggcgccgcaggaccgccccccggtcattgccccgggagatggcggtgcggacatagtcccgccgcatctccccctgaatggtgctgcggagcatccgcacggtcatggcgatccgggggatggcgatggccgcagccgcgaaaaacagataccggaacgccccggtcgggtccgcacccagatccgggaattggccgtggacaaaccagcggagggtgatgctgaacagccaggaaatcaggatgccggtgaaaaacggcggcaccgccatgcacagctggtccaacaccgtccccacggcgtctcccaccctgctgtgcccgcgggaggcccacagccccaggggaatggacaccacggcaatcagcgcgaagctgagaaggctcaggcacagggtaatccccaccttgggggcaatcagctcccacaccggctggctataactgtaagaaatccccaggtccccggtgaaaaagcccgccagccactccagataccgcaccgcgaaggggcggtccagccccagctccgcctccagctccgccacgcgctccggcgtggcctgggtgcccagcatgatctccgccgcactgccgtggatcaattcaaaggccgcaaacgccagaagggagacgatgaccatggtgaccagcagcatcaaaatccgcttgcatacgtacttcatggcatcatctcccttccggggcagcggcagcatacctgccgcgcattggatttactgggcgtaatggaccgtggacaggtccatcacatagatgggatagaactggtatccctccagcccgttccgcagaaccaccaggtccgccaggtcctggatgtagacattggcggcgtgttccgtcaggttccgctccatctgtttgtagagctctgtctgctctgcgtcgtcggccgtggcctgggcctgctggaacagggcgtcatagtccgtgttctgatagttgataaagttgtcgtccgccgcagaggtgaaccgctccagcagcgcccgggcagtcatgttggaggcgtctacgcctaccacggtggactggaactgccggtttccgtacacctcgctgagccaggcaccccactccacaggctgaatctccgcggtgatgcccacggccttcagctgctccaccagcacagtggccgtgtcgatgtggggctgatagttggaggggacggtgatggtcatggagaacccgtcgggatacccggcctccgccagcagctccctggcccgctccgggtcatagggataatagtctgtcaggtcctccacaaaatatttctgaaacgccgggtacatactggagccgatggggctgccgtacccgtcgaaggccacatcgatgatctgctgtttgtccacggcgtagcacagggcctgccggaccttttcattgttgaaaggctccgcggcgttgttcagatacagcgcctgcaccagattcatcgtgccttccagcacctggaagtcatcccccagctgggcggcctgggtgctggtcaggtgggcgaacatgtcgatggctccgctctgcaggctcattaccaggctgtccgcgttctcaatgatccggaaggtcaccttgtccagctgggccggggtgccccagtagccgtcaaaccgctccagaacgatggagtcctgggctgtccgggagacgaatttgaaaggccccgtgcccaccggggcggtggcctggtccgtatagtcctccggcaggatggccagagtcagataggataaaaactcgctgtccggctgatccagggtaatggtcagcgtggtgtcatcagcctggatgctggaaatagcagaaagcgccgggatcagaggcgttccctccgaatcgtcggcgcagcgttcgatggaatatgtgacatcccgcatctctaccgggtccccgttgtggaactgcacaccctcccgcagggtaaaggtgtatgtggtctgatcctcagagatctcgtaatggtcagcgaccgcgggcaccaggtctccgtcaggcgtgggcttcaccaagccctcaaatacgttgaacatgacttccttggttcctgccgccaccgccaggtgagggtcaagactctcgtccaggtcctgcgcgatgcccaccacgatctcgttcgcctgggcccgcgcctcggtagagccgtccgctgtctgtccatcctctgacgcctgctctgtgctgccgcctccgcaaccggtgagtgcggcgctcaggaggcccgtcagaagaaggagcgccataagcctcttcttcatggttctctcctttgcatcactgctcatttcgagtcagtgttgggcggaaactgtccgccctgacagaaatgttcggctctattcaattttaaaaggagcctcacagggcatgttatttttataacgcttgccctgcaagggtgtattgtacacgaacgccccggggattgcaagggctttcgcaaaaaaacagcctgttcgggggagaaacattcacaaatccgtcacacctgcggaattgaatttccgggggcggcgtgctatactaatttacatcgctttggatggggccgcccatcccagtcaggaggtgtcactcttgaaaacgaagaaactgctgttcattctcaatccccgggccgggcggaacaagccccacggtccgctgtttgacgcgctggccatcctctccggcgcgggttacctcatccggatccacgagacctccgccccaggagacgcggccgataccgccgcccgggagggcgccggatacgatctggtggtggcagccggaggagacggcaccctcaacgaggtgatctccggcctgatgcggctggatgccccgccgcccctgggctatctcccccagggaaccaccaacgacttcgcctccagcctccagattccacggaccccggcgtccgccgcgaaaaacattgtacagaaccgcatgcgggaactggacatcggccggtggaatgagcggagcttcatctatgtggcctccttcggcgccttcacccgcagttcctatgccgcctctcaggcggccaagaacgccctgggccactttgcctatattctggaggggatgaaggacctgaacaccctccgcccctatcacatccgcctcaccgctgacggagaggtgctggacggggactacctgttcggcgccgtgtgcaactccacctccatcggcgggctgatgaagctggacccggagcgggtggtgctggatgacgggaaattcgagatgctgctggtccccagccccaagacagccgcggatctgcagaatctggtgctggcgctgctgaaccagcagtatgacagccagggcctggtgttccgccacgtctcctccctccggctggagacagaggaggagctgccctggtccctggacggagagtatgcccccagcgtgccggtggtggacattgtcaatcgacagcgggcgctgaggatgctgttatgagagacttggaacatctgcgtcgccggtacgcagaccatgtgccggggcttctgggcgcccggcacagctatgccgtcctctgtcccctggtggagcggccggacggcctgcacctgctcttcgaggtccgctccgccgccctgcaccgccagcccggggaggtgtgtttccccgggggccggatggaggcgggggagacgccggagcagtgcgccctccgggagacggaggaggaactggccatcccccgtcaggaggtggaggtcctgggcaggccggacttcatctgcaatcaggcgggctttctgatgcagccggtgctgggactggtctcggccgccggttttgcggcggtggcgccctcccctgcggaggtgggagaggcattcaccgtccccctggctttttttcgggagaccgctccggagcagtatgtctatgccctgcagccggacgtgccgggggactttccctatgagaccgtggggattcctgcggactaccgctgggcccggggccgggtggaggtccccatctggtattggcagggccacgccgtctggggtatgaccgcccgcctgacccaggacatcgtccgccacctggaataaagagcacaggcagggccggagcattcgctccggccctgcctgtttagaatggaggatttatgtgcccagaaactccgggtcatatccgatgaacttttcccacgccggcccgtccgccgccggagaaaagccgaactcccggtaaaagcccgccgcagcctccgtctccggcgtgggcagccgcaggcggtcccggcccatggggcgatagtgcatcactgcctggccgatcagctgcacgccgtaaccccggcgccgccagggctctgccactgccagcagggggatccagccgcagccccgctccgattcccggccgtcgtcaaaggccaccgcgcccacaggcgttccatccagataccccgccagtacaggcgccccggcggacagtgccccggaggtccccgcccacgccgccggaaactccgcctgctcccgcgccagggggcggaaatagaggccgggctccagtccgttggcccgctgcttcacggtgcatccttgggtgaaggccgggtctgtcagatggctcgcatcgtcccgccagaccacctggatccgcgccccctccgcccgcagcagagagacagcggtgttgctgccggtgggcgtcttccccagctcctccagcgggatgccctgcagggccgccagcagcaggcggatggcgcagccatgagagaacaccgccgccgtttttccgtcattggccgccgcaatgtcccgcacggccgccagcagccgggtctggactgcctggggcgtctccgcgccctctacgtgccacaggtggagccggtggttgaagttttccagctgcgccgggtcctgccgggcgatctctccccaggtcttctcctcccacacgcccacgcagatctcccgcaggtcccgccgccggtgcaggggcaggcccttgggcttgtatatggcgctggcggtggcgcaggtgcggtagaggtcgctggcgtagaccgcgtcgatgggaatatccgcgaatcggcgcgccagcgcctggatctgccgctcgccccggtctgtgatgctgctgttggcctgtccctgggcgatgcggtacaggttgccctccgcctctgcgtggcgaatcagatagatggtggtcatggtttcctccgtccgggcctgggcccgccgttttgagatttggatgtcgttatcatcattataacggatctgccggtttctggcaaatcgctctaacgcgtttttttccgggaaagcggctatactacgctcaggccgcaaaggagtgactgaagatgagaatgtgtaccggattttgggtcggtatcggcgccggactgatggccggcgcggcagtgggaatgatgatgccctacggcagggatcccatgaaaacgcaggtgggaaagagtatccacaagctgggtgtcgccgtggaccatgccgtggacagcatcgtttccgaaatgcgctgacgcgcagggcggggagcctcggctctccgccttttttgataaaatcgtttttggggcttgactttgggaaaagctctggtataataataacgctgtcgcatttggcgacgcctcgtatacagaaattagaaccagaacagctatggagaagtcgcctagttggtcgagggcgcatgattggaaatcatgtaggcccctaaagggtctcgagggttcgaatccctccttctccgccacagaaagccttggaaccgtcaggtttcaaggctttccttttttgcgtcctgcaagcgttttcgccgcaggaaaaccccttggcggaacgaaagagagacatctgcttttagcagatgtctctctttcatggcaaggggtaacaatccaaatcctctcaggtcggtcgaactctcttgcattcaaatttgcaatttttcttgagaagcatctaaccggccttctggccggcagcgcctttgcgccgtacaagcgttttaccacaggcaaaaccttggcgcagggcgaattcacttcgcccgagcatttcaatcactgaagggtggagcgaccaacgggagcgaaacccaaaagaaaatgcgacttgtcgaaacaagtcgcattttcttttggagcggctgatgggagtcgaacccacctatgcagcttgggaagctgccgttctaccgatgaactacagccgcatctgagttgttattataccagaccgcttcatattttgcaacccccaaatcttctccggcatgaacgccttttcgcggacatagattctaccatcgaagcaaagggggatcaccatgaaaaaactcgtcgtgctgctgtgcgccctgctggcgctggggagcagtgcccaggcgctggaagtatccgcgccctcggctctgctgatggaaaaggagacgggcaccgtcctcttcgccaaggacgaacatgccaagctggagcccgccagcgtcaccaaggtcatgacgctgctgctgaccatggaggccatcgacgccggacagctccactatgacgacgtggtcaccgcgtcggcccacgcctgctccatgggcggcagccagatctggctgaaggagaatgagcagatgacggtcagcgatatgctgaaggcggtgtgcgttgtctctgccaacgactgcgccgtggcgctggcggagacggtggccggcagcgaggaggcctttgtggagcgaatgaaccagcgggccgcggagttgggcatggccgatacccacttctgcaatgccaccggcctgccggcggaggggcatgtcacctccgcatacgacatcgcccttatgagccgggaactgatccgaaaccacccggacatccgccagtacaccaccatctggatggattccctgcgggacggagcctcctccctggtgaacaccaaccgcctgatccgcttctaccagggagccaccggcctgaagaccggctcaacagacagtgcgctgtactgcctctctggtacggccgagcgggacggcatggaactgatcgccgtcatcatgaaggcaccaacctccacccagcggtttgaggatgccaccaatctgctgaactacggcttttccacctacacgctggagaatgtggtgccggagtccgccctgccgccggtgcccgtgtccctggggacccaggccacagtgcagccggtgctgggggagaacacgcacctcctgctggaaaaggccaaggcgggcagcctgcagcagctggtcaccctggcggactctgtggaggcgccggtggcggcgggcagtcaactggggaccctcaccatcacctccggggaagaggtcgtggcggagctgcccatcctggcaggagaggagatcccacgggtcaccttcggccagatgctggtccagatgctgcggacggccttcctctgcggctgacggcggcggggggcgctgcaccccctgaaatcccggcggattgcgaccgctttcccttgtgtcccgtttcggggcatggtataataaggcaacaaacccgcgcagctttacgaaagagaggccggtcatgatgctggatgtcaaatcgttccaattacagtcttttctgcccctgccctatgaggaggtcctggcgccgcggctgaagcgggcccatgagaagctccagagcggcagcggtgccggcggagagttcaccggctgggtccatctgccccgggactatgaccgggaggagttcgcccgcatccaggcggccgcgtcccggatccgggccaactcccaggccctggtggtcatcgggatcggcggctcgtacttaggcgcccggggtgtcatcgactgcctgcgctctcccaattacaacctgaagcgcaaggatacgcccaacatctactttgtgggcaacggcctttcctccgacgccatgggggaggtgctggacctggtggcggacgtggatttctccgtcaacgtgatctccaagtcgggcaccaccaccgaacccgccgtggccttccgcttcttccgggcggccttggagaagaagtacggccgggagggtgcccgggagcggatctacgccaccacggacaaggcccggggcgccctgaagtccctggcggacagcgagggatgggagaccttcgtggtccccgacgacgtgggcggccgatacagcgtgttgaccgccgtgggcctgctgcccatcgccgtggccggggtggatatcaccgccctgatgcagggagcggcggagatgatggagacctgcaccgaggcttccttccggtgccctgcctggcggtacgccgccatccggtacgagctgtaccgggcgggccggtccattgagctcttggcctgctatgacccggcgttccggttcatggcggagtggtggaagcagctcttcggtgagagcgagggcaaggagggcaagggcctcttccccgccagcgtggagttcactgcggacctccactccatgggccagtacatccaggagggcaagcgcctgatgtttgagaccgtggtgcgcctgggtccctccgaccgacagctgacagtcccggcggacgaggcggacggcgacgggctgaacttcctggcgggcaagtccctggacttcatccgggaccgggccatggagggcaccctgctggcccacacggagggcggcgtgcccaacctgatcgtggagacctccggcaggacgccggcagacctggggcagctgatctactttttcgagtacgcctgcggcctctccggctatctgctggacgtgaaccccttcgatcagccgggggtggaggcctacaagaagaatatgttcgccctgcttggcaagccgggctatgaggaccggcgggcgcagctggagagcaagctggaggggtgaccagcctcggattgggcggcatccgtcctgccgcccactgtcaatctccattatgaacaaagtttgaatcttcatttctccattgtttttcacgcgatcttgtggtatgcttaacataccgaatttcccccagcgactttaattgacaggagtgattactatggtcagactgattatgggcgtgaagggctccggcaagaccaagcagctcattgaactgatcaacaacgcggcgaaggacgagcccggcaacgtggtttgcatcgaggctaaccgcaccatgacatacgatatccactaccacatccgcctgatcgacgcccaggagtacaatctggacagctacgagctcttccggggcttcatcagcggcctgtatgcgggcaactatgatatctcccatgtgttcatcgacaacctgtgcaagaccatcggccgggaagtggacaaggacaccgagaatttcctgaactggctggacgcctttggcgagaagaacaacatcaagttcaccgtcaccatcagcgccgacctctccctggctactgacgggatgcagaagttcctgtaaggctgctgcgctttcccatatacacagacgccgcctctgccaactggcagaggcggcgtttttcaggtttcagatttgcacctgggaggatccggcgtccagcccctccagcagattgtaattatcatagtccgccacagaggacaggtcgctgaggcacagctggtccacgccgaagaaagcagccatccgggcccgctccagggcggcctcgccgttgagataccacaccgcggtgtccccgctgccggaggtgagataggcgcaggcgtagcggtcggagtagtaatctttcgtctgggaggcggacagcagctgctcgatctcggcggcggaggcctggccgatgtgccgcccatccgtccaggcggagcccgtggtggtcagcagcaggctgagacaatcggaatccacctggtccgccagttcggccagggcgtagtagacctcctccaacggcgccaggggggcgatggggaagtcctcggacacgtcgccatagtccgccacccgtaccaccagcttgtcggccggctcactcagggcggcatagtcatagccgttgtatgcggctccctgccagacgggcgcctccaccatcaaatagagcagccggtcctctcccagttcggcccgcagcgcctccgccagcgcggtgaaatccttcttctgggcggaagagagctccgccaggtccagaaacagcccctcataaccgccgctctccaccgcggccgccagtacctctgcggtgtggctggggtcatccttcagtgccgaggcgctcccgcccacatgcagcagcggcacggcaccggcggcggtgatggtctcctgcagggcggctgcggtctctgcatcgggggtaccggcgagccgggactccccggcgtagatcagccgggcgccgcccaccgccacggcgccatagccggtcaggtctgtcagaccctccgcggaataggcgatgccggttttctccggggccgcggcgtgatagctgtcatacagccggatcagcatgaccgccgcctgctcccgggtggcagtctgatccggggagaaggtggtggccgcagtgccgttcaccagccccagctcatgggccatggcgatatagcccacgttggtggtcacatctcggaagggcatgggcaggtcctgggccaaaccggcgatggtgccgtagcccatagcccgcaccagcatgaccgccagctcctcccgggtgatgggctcccgggggcggaacgtatccgtctgccgggtgatggccccgttggcataggcggtctccaccgcgctgtaataccaggcactcttgtcctggttgtccgtataggacccggcctccggtgttaccatctcccagccgaacaggcggcacagggccaccacaaaggccccccgggtcatgggagcccccaagccgaagcgggtgggcgtctgcccctggaacaggcccaggtccacggcccgacggatggagtccgccgcccagtggctctccggcacgtcggaaaagccggtggaggccgctgccgcgggcgccggcagcgccgctgtcaccagcagggcgcagagcagcgcgcaggaacagaaccattgcagtcgtcttttcatgttgtcattcttcgctcctttagcgtcagatttctttcagattctggcagagatgcccggattcgccctctgtcggtatgccattgtaccagaatctgccgccgccgtcaaacgaacggtgtcggaacgcagaaaaacctttacgtttcaccccttgcctgctataataatttagttatgatggctttttattacctttgaaagggagggaacgtgccatgagattcaaaaaatggaacatcgggaccccggctgagcgggacgttgccctcctgcggagtgccggatacccctatctcctctccacggtcctggcggcccggggtgtcaccactgccgaggcggcggccgaggcgctggagcgggacaggagcctcagcatgtcccccatgctgatgcgggatatggacaaagccgtcgcccgcatccagcgggcgatcagccagggggagaccatcgccgtgttcggcgactacgacgtggacggcatcacttccacggttctgctgatggactatctcaaaagctgcggcgtccgctgcctgcggcatatcccccgccggatcgaggagggctatggcctgtccaaggaggccatccaaggcctgcgggaccagggcgccacgctgatgatcaccgtggactgcggcatcaccggcaacgaggaggtggacttcgctgcctccatcgggctggatgtggtcatcaccgaccatcatgagtgcaaggaggagctgccgcgggcgctggcagtggtggacccccaccgcagcgactgcccctatcccttcaagcatctggcgggagtgggtgtggcgctgaagctggtgctggccctgggggcgagagccgggaggatgccctgttcgcccgatactgcaccctggcggccattggcaccattgccgacgtgatgcggatggagggggagaaccgcaccatcgccttctgcgggctggaggccctgccccacacggacttcgtgggcgtccacgccctgctgaaggaggcggggcttctgggcaagcccatcacctctgtccagatcggctttgtgctggccccccggatcaacgccgccggccgcatgggcgcggcggatctggccgcggacctgctggagaccgatgaccccgcccgggccgaggagctggcaaaggctctgtgtgacctaaaccgggagcggcaggcggtagagcaggccatctgcgccgacgccaccgagaagatcgagcgcctccgggccgaggaccgcagcgccctggtcctctccagcgaggactggcaccagggcgtggtggggattgtggcctcccgcctcagcgagaagtacgcctgcccaagcttcatgattcatctgaaagacggcgtgggcaagggttcctgccggtcctacggcgggttcaacctgttttccgcgctggagtcctgcgccgacctgctggagggcttcggcggccacgagttggcggcgggctttaccatctccgaggagaacatcgacgccttccgggcccggatgaaccggtatgtccgctccgcctccggcggggaacgggcggtatcctgcctggacgtggacgcgcccatctcctgccccggcgaggtgacgctggcggaggtggagcagctggaccagctggagccctatggcgcgggtaatccccggccggtgttcgccctgctgggcgccacggtggacgtcctgcagcccgtgggccaggggaagcacctgaagctccgcctctccaagggcacgtgccggtttgacgccatcttcttctccatgacggaggagacgtgcggcgtggcggcgggcatgcgggtggacgcggccttttatctccaggccaataccttccggggcaataccaccctgcagctgcagctcatcgacatccgcccctctctgacccccagccgccatgaggcggcggacctggacctgctccaccgcctcgtggcgggagagggcctcaccgggcaggagcgggcccggctccaggcgtcccgcagccagttcgccgccttttggaccgtgctggagcggcagctccgccggggaaaggcggaggaggagatgctgccctttctgcggcggctgtcggcactctccggcgggtgtgagagcttcctccgggccggcctggccctggccgtgttccaggagcggggcctgatcgccctgtccgtccagggggaccaggtgacgctttcgctgaatcccatccaggggaaggtggatctcttcgcctgcccctatctgtcccgcctgcgggaggacgccgccggcaagagtggaggtgttgtgtcatgaccattcaggaacagtatgagaacctggaaaagactgtccggggctacaatcctgcggcagacttccagcacatccgggcggcctttgaatttgcggcagaggcccacaaggaccagaagcgcaagagcggggagccctatatcatccatcccctggcggtggcgcagattgtggcggaggagctgcggctggacagcgagtccatcgaggccgccctgctccacgacgtcatcgaggacaccgccgccacccacgaacaggtatccaaactcttttcacccaccatcgccgacctggtggaaggcgtcagcaagctgacccgcatccagtacgccaccaaggaagacgagcagatggagaacctgcggaagatgctcatcgccatgagcaaggacatccgggtgatcctcatcaagatctccgaccggctccacaacatgcggaccatggagtaccagtctcccgccaagcagaagcagaagtctctggagactatggagatctacgcccccatcgcccaccggctgggtatgcagcgcatcaagtgggagctggaggacctgtccttaaaatatctggaccccattggctacgaggaaatcgtctccaagctggaggccaagcaccaggagtacgaggacttcatgcgccgcatccagatccagatcgacgaccggctgaaggagctggacatcgatcacatcgtctacggccggatgaagcatccctactccatctaccggaagatgttcaaccagaacaagagcctggacgagatcttcgacctgttcgccttccgggtgatcgtgaacacggtgggggactgctacaacgttttgggtgtcatccatgatctctacaagcccattctgggccgcttcaaggactatatcggcactccaaagcccaacggatatcagtccctccacaccacggtcatcggcgcggacggcctgcccttcgaggtgcagatccgcaccaaggagatgcacgagatcgccgagtacggcgtggccgcccactggaaatacaagcagaacggccagggcgccggcaccgaagggcgctacgagtgggtccgccgtttgctggaaaaccaggagggcgcggacgcagaggactatatccactctctgaagatcgatatgttctccgatgaggtgttcgtcttcacaccgggcggcgacgtgcagaacctgcccgccggcgccacgcccatcgactttgcctacgccatccactccgccgtgggcaaccggatggtgggcgccaaggtgaacggccggatcgtcacgctggaccatgtgctgaaaaacggcgacatcgtggagatcctcacctccaagaacgccaagggtcccagccgggactggatgaagattgccagaagcagcgaggcccgcagcaagattcgccagtggttcaagaaggagaagaaagaggagaacatcgcaaacggccgtgccgccttcgaggcggagctgaagcactgcggcatctccatgaaggacgttctctcgccggagatgctgccggtgctgttgaagcgggtgtcctacggctctctggacgacatgtacgccgccatcggctacggcggcttcaccgcccagaaggcagtgagccggatccagggggagctgaaccgggtggcgaagctccaccaggcggaaaaggccgccgaggagctggcggaggccaaaccggcggagcctgccaaacagccctccgctcccaagcgggtgaagagcgagcagggcatcatcgtggagggcctggataactgcctggtgaagttctccaagtgctgcaccccggtgccgggggacgacatcatcggctttatcacccggggtacggcgtgtccgtccaccggtgcgactgtcccaacgcctcggaggagaagcgatcccagccggggcaggaggggcgctggatcaaggtctcctggggcggcgacaccaacgacagctatcccacgattttggaggtggtgtgcaaggaccggcagggcctgctgctggacatctccgctgccctctccacgacgaatacctttgtgctgggcatcaactcccgcagtacagaggaccagtttgccatcttccggctggagatccgggtgaaggacggcgcccagctgaagtccgtcatgaacaagctgaaccagatctccggggtgctgaaggtcaaccgaccggcggggtgagagcggcttccgccggggtgattcgatggcggaagagcttccggggggatgtaggggcggcgatcaaccgcccggagatgatttgggccgccgaacggcggccacgggggattctgctcccgcagggggccgcttccacgggggatgcgccccccattgtcgtcgtcgcaaagtccgctcagctccgtttccgcctgcggcgaaaactgcgcccgctcccttgctcctcctctccccaccgcgcggggcgcggcgggggcccctttcggtcttgccaaaagagaaatgggccgtgcacggtctaaagagaaaagtgtgtggcgcgctgcggtgcagtggccctccgcgctgacggaggtcgacgtatcggtgcaagcgccgattttggcccgccttcgggcacgcttgggccttctgcgattttcctaactgccgtcccatggcgggagtaccaaccttgtcggggtggttatcgcatggaattgcttctcttttcgctgccgctggctgcccctcgggggaactggcgtagcgggccgataaaggcatcggcccctacggagataccgtcggccttgcgcattttgtgggggccgacctgcgtgtcggcccttgcgagggtgacgaaggccacaagcccggtaggggcggacgcccttgtccgcccgccagcacaagccgccacaaccgcccaggcagcgcgtagcgactgcgcagctgttggtggctctgccgtcttacggatgcggcgtgctccctgcgggcaagcggaacgcgcggaaggaggagccagtggaacactggtgacggaaatacggggagcgccgcagcgcgagacaggaaaagaggagcggttcaaatgcgcccgtgtcctccaatccaagacgcactacgccgcgggaatccgccgctaagtctgcaccgcaccccgccgcgcccgtcgggggaccctcgcaaacacgcaggcaccctctcgcgccgccccccgtacagcaactttgcacgcatgtgtaaagttgcggccaaagcgcctttttctcttataccgggcgcggcgcgttctctttttggcgctgacaaaaagagaatgggggcgcatctgcacggccgtcagcatggctgatattccccgcagaaatagaagccttccattttgagtgaaccatagaaaggaatccattgtatgcgtgcagttgtgacacgggtggctggtgcctccgtaaccattgccgggaacgtcaacggccggatcggccgtggcttcctggtgctgctgggcgtgggacccaacgacaccgaggagaccgccgaccgcctggcggagaaaatctgcaacctgcgggtctttgaggatgaaaacggcaaaatgaatctgaatctggagcagacaggcggtgccctgctggtggtgtcccagttcaccctgtacgcggacacctcctcccgccgccccggctttaccggcgccgccaagccggacgcggccatccccctgtatgagcgattcatggctcactgcagggagcggggcttcgacgttcagcatggggagttcggcgctgatatgcaggtggactcccggaacgacggccccgtcaccatcctcttcgacacagagcggcccttatgagggaagcggcgcagggcggcggcgaaatggcgccgccggagctggtgcggacgttctatgagaccgtggtctcccagcaccgtctggaggacctgccccgcttcgtcgaggagggctgcgtgctccgccagggggagtggaccactcccctgggtcccggcggcatggtgcggcatctggcggctctgcgggagacgtatccggattacacggtccgcatcctccgccagcactgggccgcgccgtatgtcgtctccgagtgtgttatggaggggacccacctgggcccttggcccggaacagtccccacgggaaaacgcctgatcttcaccggcgtgaacatcgaccgggtggagggcggaaagatcgtggagcacggcggcgctgtgaacacctttgagaccctgtgggacgcgggcatgatccgccctgcggagtgacagggcatttgtccattccacacatgggcgggcgggatttccgccgcctgcctctgatattttcatttggcaagggaggtctcccatgaagatcaagtgcttgcaggtgggccccatcggcaccaactgctatctcctctgcgacgaggatgccaagacctgcgccgtcattgatcccggcggggatggggcgcggatcgccgccgcggtggcggaaaccggctgtgtgccctgcgccatcctgctgacccacggccactacgaccacaccggcgctgtgggagagctccaggccaaatggccggagaccccggtgtatctgaatcgccgggatgtgtacgccgatgcctgcacccagcagctgttcccgctcctcagcggggacgtgcgggactacgacgagggggacacggtggctgtgggcggcctgacggtgaccgttctggccacccccggccacagcgaggggtctgtcaccctccggtgccaagacgccctcttctgcggggatacgctctttgcgggctcctgcggccggacggacttccccggcgggtccatggagaagatgatggcctctctgcggcggctggggcagctggagggagacctccgggtcctgcccggccacatggaggcatccaccctggaccgggagcggcgctggaacccctatctgctccaggccatgcagtgaggagggcgcgcccatgaaactggttttccgcggccatgacgagcggtatgtggtggagcagagcctgatgaatctgttccccggggaactgcctgtctacgagccgatcaccccaggcgatgacagctgggccgtgatctcgctggaggagacgggggacctctgccgggtggcggtctccctctgccggggcggcaagaccaccgagcagacctatcaggagcccctctccggcggcgatttccagcgggagggcctccgccgccacgccgtcggcgcctgcttcttcctggtggcccgggcggtcaccggcgtgacgcccccctggggaatgctcaccggcgtccggcccgacaagccggtgacctgggccctggaggacgggaagtccccggaagaggcccgggcgtatttggaggagcactatttcgtcaccccctcccgggccgccctggccctggagaccggcgccaccgcggccaaggccgcccggcggctggagaagcgggacattgacgtgtacgtgggcattcccttctgcccaacccggtgcgcctattgctcctttgtcagccagtcggtggagcggagctttgccctggtgcccccttatgtggacgccctgtgtggggagatctccgccggcggcgagatggttcgccgggcgggactgcgggtgcggaccttctacatgggcggcggcacccccaccaccctgacggcggagcagatggaccgggtcctcactgctttcgagacctccttcgaccgtaccgcctgtgaggagatcactgtggaggcgggccggccggacaccatcacggcggaaaagctggtggtgctccgcacccacggggtcacccgggtctcggtgaacccccagacctttgaagagaacgtgctgcgggccatcggccggtgccacacggctgcggacatcgaccgcgccatggagctggtggcccggtgcggcttcccccacgtgaacatggacctgatcgccggactcccggaggatacggcggagggcttccgccgctccctggaccggtgcctgacctacggccccgacgatatcaccgtccacaccctggcgctgaaaaagggcagccgcatcctgacggagggactgcggatccccggcgcggagacggtggccgagatgctggattacgcctctcccaccctccggaccgccggataccgtccctactacctataccggcagaagtacatgtccggcagctttgagaacatcggctggtgccgcagcggcggcgagtgctggtacaacgtggacatcatgtcggagctgtgctccatcctgtccttcggcgccgccgggtccaccaagatggtggtgccgggcaccaaccagatccagcgggcgttcaacgtgaaatatcccaccgagtatatccagcggccggagaagtggcaggccaatcagaccgccttcgccgccttttatgaagcactgtgaaaggagcatcgccatggcctattccctgaaagagatcaacgacgctgtccgctctgaccccaagggctttgcggaggcgtgcgacgccgcctttgccaaaaaagtggagacggcggcccagaagattgccgatcaccggaaggagtcccgcatcatcctgttgtccggcccctccggctccggcaagaccaccacggcattgaagatcgaagagcagctggagaaaatgggcatccagacccacaccatctccatggacaactacttcaacaccatcgacccggagacggcgccccggaaccgggagggcgccatcgactacgagtctcccttctgcctcgacatcgagctgctgaaccgacacttctccatgctggaccggggggagaccatccacgtgcccaagtacgagttcgcccgacagatgcgctccgacatcctgtctcagccgctgaagctggggcccgacgagctggctatctttgagggcatccacgccctgaacgacgtgatcgtgggcaagaatcccaaggccttcaagctgtatatcgcggcccggtccaatgtggtggacgaggacggcgccgtggtgttccagcacccctggctgcgcctgtgccgccggatcgtccgggactacaagttccggggcagcgacgccaacttcaccctgaagatgtggcccaatgtccgccggggggaaaagctgtatatctccccctataaggagaatgcggacttgatgttcgactcctccctgccggatgaggtggcggtgctgaagcccttcgtggtccccctgctggaggcgctgccccagggcaagtatgagatcgcggacgacatcctccggggatttgagcggatcgagatcatggaagagtccaacatcgcccccagctccctggtgcgggagttcatcggcggcagcatctatcccagctgagcggggctgcccctctgccccaatctttctttggaggtcatacaagccatgaatgagcggttgcaggaactgctggacgcggtgcagcgcactgcctcccaggtgggcggcagtgcggcggatgccgcctacggcatgggaaagcgggcgggagagctcctgtccgtggccaagctgaatatccggatcatggacctgaagggagcggtgagcaccgccctgcgggaggtgggggagatgatctacgccacccacaccggcaccctcacggagtccgaggtactgctggcaaagcttcaggagatcgacgggctccgccagcagatcgaccggctggagcgggagatcgctcggctccagggcggcgcggtgtgccccttctgcggggcggccgcccggagcggcgacgtattctgccgggaatgcggccaaaagctgtaaggaggaagcgtaagatggaatatacattcgcacaatatcaggagagcgcccaggcgctgagagaccgcctgggggcgttccgcccccggtgcctgctgatcttgggctccggcctgggctctttgggcaacgaagtggagtcccccattgccgtcccctatgaggatgtgccccacatgaagcgatccaccgccccggaccacgcgggccggttcgtgttcggccgcctggcgggtcaggacgtggcggtgatgcagggccgcctccacacctatgagggctggtcctttgaggatgtcagctatcccgtccgggtgctgcggctgctgggggcggaaacgctggtagtcaccaacgctgccggcacggtgaacaccgccttctccgccggggacatcatgctgattactgaccacatcaaactcttcggtgtcagccccctttgcggccccaatctggaggagttcggcccccggttcccggacatgagccatgtgtacacgccccgactccaggacaccgcccgggaggctgcggaggagctgtccatccccctgcgccagggcgtctatatgtacttccccggcccccagtacgaaacgccggcggaggtccgtgccgcccgggcgctgggcgcggacgccgtgggcatgtccacggtgccggaggccattgtggccgcccactgcggcatggatgtgctgggcttcacgctctgcaccaatatgggggccggggtgctggaccagcctctttcctccgacgaggtgcttgccgccgccgccacggcggggccccggttctctgccctggtaaaggcgtgtctggcccggttataaacggcagcggcaggccataggctcataggggcagcagattccgccgccctagttctctgttgtaatttgaggtaatcgcttcatgtctaatcaaaaaaagcaatccttcctgggcggcgccgccatcctggccgcagctgtcgttgtggtgaaatttatcgggttcttctacaaagtccccctgaacaacatcctgggcggccccggcaagacgtatttcgacactgcctataagatttacaatttcctgctgaccttctccacggcgggcctgcctctggccatctccaagctgaccagccaggcccatgcccagggacgggagaacgagaagcggaagatcttccgcaccgccatcgtgctgtttttcgtcctgggcacggtgggcgccctgtttatgttcttccaggcagagggcttggcggggtttctggagaacagcctggcggcccagcccatccgggcgctggctccggcggtgttctgcgtgtgcctgctggcctgcatgcggggctacacccagggccagggcaacatgacgcctacggcggtttcccaggtactggaggcgcttttgaaactggctatcggtctgccgctggcgtggtatgtactgcgcatcggcatgagcctggagatgggcgccgccgcggccatcctgggcgtcacggcgggcacggcggtctccatgctgtttttggtgggatatttggcgaagcaccggaatcggacacagtccctggatgtcccctccggcagcagccatctgatccggcagatcctggccattggcatccccatcaccctcagcaactccgcaatgagcatcctgaacatcatcgacaccaagatcgtcatgggccagctgcagaacgccctgctgctgtcggaggaatcggccgccgccctgaacggccagtacagcatggccatggatatgcccaacatggtggcctccttcgtgtacccggtgaccatgagcttgattccattcgcggcggcggctctggcccggcaggaccatgccggagcggaccggatcatctcctccgccttccgcatcatcgccattctggccctgccggcgggcatcggcctcagtgtcctctccacgcccatcatggtcctggtgctgccggcccagcgggaggatgccctggcggcgggcccccatcttcaggtgctgggcatcgccctcatcttcatctgcctgatgatcctgaccaacgctatcctgcagacctacggcaaggagaagctgcccatcttcaccgtgatcgtcggcggcatcgtcaagatcatcatgaactatttcctggtggggaatccggacatcaacatccacggcgcacccatctccacgctatgctgctatctggtgatcgtggtgctgaatctgttcttcgtgtggaaatactcgccccagaagccacggtatctcgaagttttcgcaaagcccgtggccgcttccctgctcatgggcggcgcggcctgggcggtctatggcctagccagccgggtgctggatggggctttcctcgccctggcacagcagatgtttgcggatccggataagatccagctctggtctgtatatctggccaacgccgcctgtgtcctgctgggcatcctggccggcgtgatcgtctacggtgtgctggtgatcgctctgcggatcctgcgggcggaggatgtgcggtccattccccgcggggaaaagcttattaaacttctgcacttaaaatgagaaaccgggcggccgcgcccccttcccaagggggcgatccgctaaaattccttgaaaaatcaggggtttcccgtgaatttttcttgcaaaggcaggcatcttatggtagagtttcagcgtaaggatttttacagctacgaggattttctggagatcatgcggctgctgcgggctcccgggggctgcccctgggaccgggagcagacccacagctccatccgccggaacttcctggaggagacctatgaggttctggacgccatcgaccacgacgacgccagcggcatgtgcgaggagctgggcgacgtgttgatgcaggtggccttccatgcccaaatcgaggcggagcggggccgcttcaccatggcaaatgtggtggacggcgtggcccggaagctggtgtaccgccatccccatgtctttggggacgtgcaggcggatacctcccagcaggtcctggccaactgggacgtgctgaagcgccgggagaagggccagcggtccacggcggacgcggtggaggccgtgccccacacgctgcctgccctgtggcgggcggaaaaaattcagtccaagaccgccaaggccggctttgactggacaagctctctccaggcactggacaagctggaagaggaggtccgtgagctccgggccgccctggaggccggtcaggccgccgatgcgccccacggcatccgggaggagctgggcgacacgctgtttatggccgccaaaatcgcccagatgtcgggcgtggacccggaggacgccctccaccgggcctgcgacaagtttgaccgccgcttccgcgcggtggaagaggccgcggacaagcctctgccggagtgcggtgaggcggagctgctggccctctggaacgatgcaaaatcccacgatccgtcttaatcgcgggcgcgcctgcctgcgttaggaataaatcatctagcaagcgcatcacacattgtataggaggataacatccatgaacaaagctgaactcatcaattctgtcgccgcttctgccgacgtttccaagaaggaggccgaggctgttgtgtccgccacgtttgacgccatcactgccgccctgaaagacggcgacaaggtgcagctggtgggctttggatccttcgaggtcaagaagcgtgccgcccgcgtgggccgcaaccccaagaccaaggagtccattgagatccccgcttctgtagtgcccgtgttcaaggccggcaaggccctgaaggacgccgtggcgaagtgatctgaccctgtgatttcgggactgccggtgctgtggtgccggcagtcccgtttcccatgagaaaggagccgcccatgcgtttggataaatatctcaaagtctcccgcctcatcaagcggcggactgtggccaacgaggcctgtgacaacggcctggtcaccgtcaacggcaagcctgcccgggcctcctacgacgtgaaggtgggggaccagatttccctgcgcttcggccagcgcatcgtaacggtggaggtgctggacgtccaggagacggtgcgccaggcggacgccggcacgctgtaccgggagatcggccggtaaggccggacgcatattctccccgcccctcccatatagttgggacagggagggacgcggaatgaacgactacaacaacgccatgtcccaggcgggccaccgtctggagctgatcggccgggagcggctcacggtctccggagtggaggacgtggagcggttcgacgagaccggcatcatcatgtccaccagcgtgggaacgctggtcattaccggagaggacctgcacatcggcaagctgtccctggacgggggcgagctccatgtggacggccggatcgattccgtctcctatgaggacggcggtcaggagcgggggggccttttccaccggctgttcgggtgaggcgccatggcccctgctctctcccagccgctcctgctcttctgtcaggcgatcctgctgggcatggctgcggcgctgctgtatgacctgctgcgggccttccgcctgcggctgccccgcctgacgtcggcgctggacatcctgtactgcatggccgcgggcttggcggtcttcctcttcatgctccgccgggcgcaggggcagctgcggctgtatctgctgctgggggcggtgggcggcggtgtgctgtttttcaccgccttctccccgtttttgcggccggtgtgggatttttgggtggataccctggcatttttgctgcatctgaccgccattcccctgcggggagcggaaaatttgtgtaaaaaaattggcagatggggaaaaaatctcttttattttattcgcaaatgttatacaataaaaaacaccaagcacggcagaaggctttacaaaggaggcgggcggcatggcaagagcaggacggcagccaaagaagcggtccagaggaagcgtcctcaccaagcttctgatcctggtgattctggcggcgatcggactgcagctgcgcagcctccacagccaggtgcaggacgcccaggcccagcgggacgccctgacggcccaggtccaggcccaggagcaggaaaacgccgccctggccgcggacatcgccgagggcgccaccgaggataagatgaaggagatcgcgcaggaagagctggggctgatctcccccaatcagcgtgtgttttctgtgggcaactgaccggagccgggcgacgagggaggcggagcgcctcccccgcttgtgccgggagccggtcttttttgatacgacccgcttccacgggagcgggaaaaccatccggaaggagaaacagtacactatatggagcttcaggtagggagcattttggaaggaaaggtgacctccatcaccaaattcggcgcgttcgtggccctggacaatgggaagtccggcctggtccacatctccgagatcgccaacacgtttgtcaacgacgtacatgactacctgcaggaggggcaggccgtcaaggtcctggtgctctccacggagaatggaaaggtcaatctctccatcaagcggacgctccccaggccggagcggcccgcccgcagtccccggcccagcggcagccacccggcggggacgtcccgtcccgtggcccaggcccggcccgccgcccgggcgcagcagccgctgcccccctccggcgaccagtcctttgaggacaagctgaagcagttcctctcctcctctgaggggaagatggccgacctgaaccgcagcctggacgggcggcggggcggcggccggcggcgcagataacaccagggcgcgcggcaatgccgcgcgcctttttcatgtccgccggataaaaaagggccgcccagcggtttcacgctgcgcggcccaagcgggtgggatattggaaagcttccgggattatcatacacccgccctgcatcccttgtaaataggagcttttgtcggatcggctcctcttttgtcggatcgctgcgggctctgaacaatttgtgaatttcaccggctcgccccttttcaaatggaaagatttgtgctatattaataaaaaggggagagatccccgatctctcccacacgaaaggagcgatccctatgaagtatacctttgcctgcaagagagtcccgctgaatgattccatcaaggaatatgcccagaagaagatctccaagctggagcgatacttccgggaggaggataccaccgcgtttgtcactttctctgtggagaaggaccatctgtgctcggtggagatcacgatccgcggcggcaccacgttgctgcgggcacagacggaggctcctgacggagatatgcgcggcgccattgacgccgctgtgggatatatcgagcggcagattctgaagaacaagacccgcctggccaagcgcctgcggactgagggcttccccccgcccgccccggcggacgactttgaggtggctgaggagaaggagttccccatcgtccgtaccaagcgcttctccgtgaagcccatgagtccggaggaggccatcctgcagatgaacctgctggaccacagttttttcgtgttccgcagcagtgaggatgacggcctatctatcgtctaccgccggaaaaatggcggatacggcctgatcgtcacggatgaagaggagtgacccgtacctggcagacagggcggagccgcgtcagcggctccgccctttttcgctccgccccggagatggcgcgcaatgcctcttgtccttttcggcatcttctgctatactgataccggcaaatccccgctatgggtcaaaatacgaggaaagaaagaacaatttgatgaagatgatttttttggtggacggcgacaacaacattggcaccgggctccagggtatcgacctgctgactgccgaggacaccgtcctggtctttttcggcaaggggcagaccctggccaacgtgaaaaagctgtgcgccggcacaaaggcccaggtgcagtatctggagagcgtgaagggaggcaagaactccctggacttccagatcatcacggagctgggcgtcctggtgggaagaggagaggcggatttcgcctatgtcatcagccaggacaagggatatgaggccgccatgagtgccctccacgcacgatacgcctccacgttccgggaggtggctctgcgcccctccattcaggactgtctccaggcggcgttcctgctgcgggcaggcactcgggaggagctggccgccgccctggcccggcagtacggccccgtgcagggtcagctggcctatgagcatctggaggccctgctcaccccgcctccggtccaggaggcggcggccccctcccccgcgccggaaaacaaggcggcgtccaagcccggaaagcggcgcagccgcgcggcggcgaagccggcggagaccgccgagcccgccccggcccagagcgccccacaggatgcggaggagcctgccgggacggcggagcctgccgccccggccgccagatcccgccgcagcggtgccagccgccgccggaagcgggcggagcggtccaaggcagaaaaagcatgacaagaggccgcgcctttggcgcggcctctttgaatccgccacagtgggcaacacggcgcccggccagtctggccgggcgccgtctgtcacgttgtctgctgttcgtccagggcccgcagcagggcctccacggtccgctccaccacccggaccgtctcttcgtcccggtcccgcagcagatccgtgatccgctgcacagcgtccccgggcgcgccgaagagcacatagtcggcgttcaaatccagcaggcggcacaggcggataaagttctccagccgggtgccggtgtttcccagctccaaatccgcaataaaggacacagatagatcggcccgctcggcaagcacttctctgctccagttgagtcgctctctggcttcccgaaagcggcgtcccatctctattctgtttgggtcacgttttctcataaaagcactgctcctgctgtttgagaaaagtgtaccctatttcccaataaagaaaaatatagtctagtactttattgacaacgtacaaagtactatgttaatatgaaaaaaataggacgcaggcagctgcccgcgccctaaaaagcgtattaccggctctggtccgctgtatgcatgtaggccatcagatccaggatcttgttggtgtagccccactcgttgtcataccaggcgatcagcttcacaaagttgttgtccagcatgatgccggcggtctcgtcgaagatgcaggtctctgaaaaccccgtcaggtcggaggacaccacctggtcgttggtgcaggtgatgatgcccttcatgctgttctgggcggcgttttccatggccacgcacacatcatgatagctggcaggctgcttgaggcgggcggtcaggtccaccacggacacgtcgttggtgggcacccggaagctcatgccggtcattttacccttcagctccggaattaccacgcccaccgccttggccgcgccggtggtggagggaatgatgttgcccaggacgctgcggccggtacgccagtcccggcccgcccgggcgtccacagccttctgcttggcggtggcggcgtggatggtggacatcagcgcctgctcgatgccgaaggtgtcgttgatgaccttagtcatgggggccaggcagttggtggtgcaggaggcgttggagaccacgtccatctccggggtgtaccgcttgtggttcactcccatgacaaaggtgggcgtgatgtcgtccttggccggggcggagatgatgacctttttcgccccgtgccggaagtgggcggaggccttttccgtggtgcagtaggcgcccgtggactcgatgatgtactcggcgccgcagtcgtcccaggggatgttggcggcgtcgtcttcactgtaaacccggatcttcttgccgttgataatcaggtgacggtcgtcccgctccaccgtgccctgaaaggtcttgaacacggagtcgtacttcacctgatagaccatgtagtccaggtccgcgttccgcaggttgatgccgcacatctgataggtggcgctgccgcgctccaccatgatccgcagtgccacgcggccgatccggccaaatccgttgattcccactttgatcgccatgttcccattccttcctgtattccgtattccgccgcagcggatgttgtcctcattataccatattaccggaaaatgtcaccgcaattttgcgtaaaattgcgcatataaaacgcaagatttgttgtccgttttgcacagactggacttctgttcggccgtgtctgccggacttcgacaattttccccctttttcgacaaagaccttgtctttgcatcccttttttgctatcctattggtgttcgaggcaggcttttccacggtttgaaagcccctccccgtatatgctacaagagagaatcccagctgaaaggatgcgcctatggaagcagagcaatttgacttctccgttgtgttccccaacatcgccgcccagttgcgcagcgtgttgggaaacctgcacttggcggccgcccagctggcgcctgccatccggcgggagggggatccggcgctggattccacagcttccctgctggatcagagctactaccgcctgctgcggctggtgaacaatctgacggcggcgggagagctggggcaggacgcgcccctccccgtccgggaccgggatttgacggagacggtccgtgcggtctgtgccggggctcagggtctgtttgcgctcaaaaaggtccagctggaattccggagcgctgcggactgccacacctgcgcttttcaccagccctccatcgagctgctgctctaccagttgctctccaatgccctgaagtttacccccgccggaggcgcggtgaccgtggagctgaaattcatcaaccgatgggtccgcctgtccgtgtccgacaccggctgcggtatccaggaggaccagatccccttcctgttcgaccgctaccttcacgacgatgcgatggcgccccagccccacggcctgggcctgggactgcctatctgccagcacatcgcagagcgccacggcggcaccatgattgccgagtcccggccggggcaggggtcccgcttcaccctgtcgttgccggaccggcgatgcgggactgcggacgtgtcggacgtgaagttcgattacaacggcggcttcaatccgctcctcctggccctggcggacgccttgccccccaggctttctcccagcgccatctggactgaccctggctccggctggggtcggtttttttcgcagaagcggctttccttttttccggaaatcggctacaatagccctatcacacgaccggcgctccgtcggccttttcaggaggaacccatttatgtcccagcgtgtatttgtggccatgagcggcggcgtggacagcgccgcagcggcgctgctgctgcggcaggccggctataatgtcaccggcgtgacgctgcgcctgcatccctataaggaccgcccgggcctgtgcggctctgcggatgatatcgagacagcccgcgccgtggccgccggcatggggattccccatgtggtgctggacctgtgcgatctgttccgcgagcgggtcatggaccggtttgtgtgggcctacacccacggccgcacacccaatccctgcattgactgcaaccgggagatcaagttcggcgccctgctggactgggcgctggaccagggcgcggacgccatggccaccggccattacgccagagtccgcctcgatacgccctccggccgctggcagctgctgcggggcgcggatcgacggaaggaccagacgtacttcctctatcagttgacccagcaccagctggcccatctgctgctgccggtgggagactatgaaaagcctgccctgcgggccctggcggccgccaacggcctgtccaacgcccagaaggccgacagccaggacatctgctttgtgccggatggggactatgtgtcgtttttgcggcagtatggcggcgtggagcccgtccccggtgacttcctggactcagaaggccgtgtgctgggccgccacaggggaatggaatgctataccatcggccagcggaaagggctgggcgtcagcgccaacgcgccgcagtacgtgctggggaaggacccggaccggaatgccgtgatcctaggggaggacaaccgcctctacacccgggagctgacggcggagcgggtgaactggctctccgtaccggagccggaccgccccctgtccgtcaccgccaagacccggtacagccagcgggaagctgccgccacagtggaaccgctgcccggcggccgcatccgcatggtgttcacagagcctcagcgggccgtcaccccggggcaggcggtggtgttctacgatggagatctggtgctgggcgggggcaccatctgtccgtgacgcaaaaggacgccgcgaaagcggcgtcctgcagttcttatcgctgactggtggtccagctgtcctgaaagatcaggtcatccacatccccgccgctgatcgtctggtgtctcatcattttatttcctcctttgcatttgggttctcagccagtatatgcgcctccgggcggaaaattgcacggaaacgggcacctgtctggactttttgcaacgggagttgtcgaaaaaatttgaaaggttttccttgcccgtgcttgacaatgactggagagtatggtattctaatcattgccgacagctgccggtgtggtggaattggtagacacaggggacttaaaatcccccggtagcgatactgtaccggttcgagtccggtcaccggcaccacagaacagaatatcgcggggtagagcagttggtagctcgtcgggctcataacccggaggtcgttggttcaagtccagcccccgcaaccacaaaaccgtctgatttcgcaagaaatcagacggtttttcttcactttttgtctccaaaagtttccggagaaattacgcgattttgcaaaatttgcagttgacccaaaccgtgacccagacagggcaaaaaacgtgccttggcgcagcccttctgcgccaaggctttcctgctgtttgggattattttttcgctttcagattgccgccgtcaggactttttccatagtcctggccgcctccttttgcgccgctgtcgtgacgtgggcgtaggtgtccagcgtgaagcctgcgctgaaatgtcccagcatcccggacaccgtcttaatgtccaccccattctgaagtgccagcatagcgaacgtgtgccggaggtcgtggaatcgaactctgggcaaccccgcccgcttcagcaccgggtggagtatatgcaggacgctgtctggtgagatgggcccgccagtgggcccggggaacacccagaggctactgcccgcttttttcttctgctgtttcagaacctggatcgtgtcctctgccaggggcagcgtccggtaggccttcttggttttcagggaggcatctacgatttttctgctgatccgggcgatctactgtttcatccaaaggtttccgtgttcgaaatcgatgccttcccatttcgggccaagcaattcgcctcttctcaatcttgctgccagctccacatagtacatctcgaatatcctactgtttctggcatctctaaggaaggatgccagctgttcaatgggcagcgttttcatctccttgcgtttcagcttcggcaaggcacagccctctgtggggtctgctgcaatcagccgttgctctttggccagcttcatggccgaggcgatgatctggcagatgttccgcaccgtcttggggctcaaaccctttgcctgatttttgctctcgaccctgtcaattctcccgctggtcagcagcttcttgcagaatttctgtaactccagagaagtgagcttttccagcgggaccttgccgatattcgacttaatgtggttgttgatgtacccccggtaggtctggtggggggacggtctcgctttgatctttgcgtaattttcgaaccactcgtccatccaggtacctaccgtgtacttccccgccttggtgacgtccaagctcttggtttcctcgatggccgctttcagcttgttcttcgcctctgcctgggtccggcccaagacgtttttgtagattagcttcctggtctccggattatgcccggcggtataccgcccttcccaccggccatcttttcctgatattaccttcaccgttggcccgtttctttgccatggcatccgcctccctttacgactcgataagcgtctcgcttcgctcggttgctcacatttatggagccagcgagctctcatcagcgaaacaaaatgccacagaaaaaagaaatagccagatggaaaggtgactgttatcaaaaagttaagaaagagcggccgacagcggctcttttctttgtatagcacatcaattttgacctggggatccttcattttcgccctctctgtggcccgcgtttcttcctcgtcctcaaggcaataccgttccatctccccggcgatccctatacctaactgaagcccggtgatgaagaatgtcaggaggtttcctcccgcagttcattctccagatccgccaactggagcaaggtctcctgatcttgttggcctaaccttgcgttgatttctctgtaggcttggtccagttccgcccggactttttgaagttctggctcctggcaggaccttgcgtgcaaggccttcaagtagtcgtacatcgtaccgcctccttgtcagcggaaaagcatgtcacgatgctggctcaatagccaggggacacggcgcctactatcagaaaagtaacaatttgtctgcctgattggaatccttgtcttgttttcagcgacgcattctttgaaggggctttcgtgcctcaatagccccggaacgccccagcggcactctgcggatctaaggagacagccgaattttgcggagaaaagcgtcattgctgctatttcatgtgtggaacaacgctctttcaaaatcccgcaactgcccgcactgcgggaagttgtgagcgaatcggcgcaacaaaagcgccggttctttctcctgctttttttcgtcccccggttcacttccagaaacatgggaatcctccaacggaagtggggccaatcgttgtgggcaaacctcatgtcatcttgccatttgatgagaaaggccaatgcaggcgtgaggtatctcgtcttttcgccacgctggcccgacaagggccgaaggcagttgtttgtgggcaacggatgccgccccggcctcgtccgcccgacacagcggcccacaggggcaaacgagggcggaattgttgggggctcaatgacagagaaaaaaggcttctttgtcgacggcgtcgtaattcgcgtatttagcaaaagcgcgttccctctccctatctttcgtcctctggccacaaaagtggggccgggcttctgcccagaactgcagccgccgtatagctggacgagatgcttgcccacaaaaaagcccggatggtcttgtacaaagaatcagcagagccgcacgagccgccccgctgattttacccagctccccacatgggtccaaaggtctgtgccatttacatagagttgcccgcattccaagcatcccgtggcccaactcatttcatattgcattttggaatttgaatacatagtatccacattgcattagcggatgtttattttgtcagatcctcattctttgccttctgctgaagaggttccatatttctgccgtagctgttcccaatggcgtaggaacgtagtgggcgggagtttcaggcgttccgcagccttacggatacttccgtaccgctcgtagaatgtctggagataccgcagctccatacgctccagcatctcattcagtcccgcctctgccggagcatcctgaacaggctccggacccgccacgttcatcggcaagctctccggctgaatcaagtctgtatccgtgatgatggttgcctgctcaatgctgtttttcagctggcggacgttcccttcccaccgatagttcagcaacgcaaagcaggttgctggggacagtttccgatgaaagtcgtatttttgattgtagtaatctagaaaatgctgagccagaggaatgatgtcattttttcgcttccggagcggcggaatatggatcggcatgacattcagccggtaatacaggtcctcccgaaagcgtttctgctgcaccatctcttccaagtcgcagttagtagcggcgatcactcggatgtccacctgtacgggttcgttgccgcccacgcggatgaaagagcggttctgcagcacatggagcagtttggcctgcatattcagagacagctcgccgacctcatccagaaacagcgttccgtgatctgctgcctctagaaggcctggcttcactttactgccagcgccggtgaaggcatggccttcatgtccaaagagttcgctctcaaagagagactctgtgatggcagcgcagttgatgggaacaaaccgccggttggaccgcccgctgttctggtggataaatctggcaatctcatccttacctacaccggtttctcccagcagaagggcggtagagtccaccttggctatccgggcggccagggccagcaccttcagcatctccttatcggccacaatcagtttgctttggccacccatccgggccttgatgctctccagttcctggagatattggtcattcagtccccggatcttatcaagctcctgctgcaaagagctgatttcgtccaaatcccggtcattacagatatagaattcaatctcaccgcagctatcaaataccggcgtgcaggacacatgtgcactgcgccctgtgcgatagaaggtctgcacaatggtgtgtggctttttggtctttgctacgatagcaccgcaggattcggaaatcagatggtttttcaccaactgctccaccggcacccccactaactcctctctccgaatcccggtgaggacctcataagcccggttgatccgcagcgtcaccagattccggtctgagatctggatggcatccgtagagttctcgataaaagcatccaggacacggttctgttcttccaaatccaaaactcgcttgcgcagttcctccatggtctcatgggaaaactgcgagcgcacctgcttttgctccaaaaatggaacacctcccttcgccttttgctcttttgtgcaatttcaaatttgaaatcacactttttatcgtcaaaactcatatcatctttgctttgtttttaacaaaaatgactatatcataaatcttatgttttcacaagttccaatttcggagcactctgctcaaaattcgttccaattttggaacacaaaattgcaatttttttcacataatcgaggccccgtttccgtcatggaaaataattcgatcttttttgaatttcaggaggaaccgcaattccatacagtcataggggtttctggcttttcgctggaatgtttttttaaattggcaagatttttgctataatgatttgtcgaattccaacggaatgtgttggtggcggaaatcccccgccagacataccatcgatgaaatatgtgagattttaaggaggtacaagagatggaagactggaaggtactctatgcttccaaattaatgacggcagatgaggccgtccggcagatccccgatggttcccgggtctttttcggccatgcggccaatgaaccccccgtcctggtggatgcgctggtgcgaaactatgagcaatataaggatgtggagatcgtccactgggttcccatgggaaaaggggagtactgcgatcccaagatgaaggggcaccttcgccacaatgccatgtttgtgggcggcccaacccgcaaggctgtgcaggaaggacgggcggactacacaccctttttcttccaccagtccacccgattcttctctgacggcaccttccccattgacgtggcgatggtttccgtcactccgccggacaagcacggctatgtgtccctgggcgtctccgtgggcggcaccaagcccgcctgcctgaacgccaaaatggtcattgcccaggtcaacgaccagatgccccgcaccatgggggagtccttccttcacgtctcccagctgacctgctgtgtggaggcatccacgcctctgccggagctgggcggaggcaccatcggcgaagtggaggaagccatcggccggaatgtggcctccctggtggaggacggctctacattgcagctgggcatcggcaccatccctgatgcggtgctgaagttcctgggggacaagaaggatttgggcatccactccgagatgttctccgacggcgtggtggatctgtaccagaagggggtcatcaccggtgccaacaagcggctggacaagggcaagatggtggctgccttcctgatgggctccaaaaagctttacgactttgtggatgacaatccggacgtgatgatgcggactgtggactacgtgaacaaccccgccgtgatctgccagaatcccaaagtggtgtccatcaactcctgcctacaggtggacttcaacggtcaggtgaactccgagtccatgggcaccaagcaattctccggcatcggcggtcagctggactatgtccgcggcgcggccatgtgtcccgacggcaaagccattctggccatgccctccacggccaagcacggggaagtgtcccggatcgtcccggtgtttgagcccggcaccactgtcaccaccacccgtacggacgtccactacatcgtgacggaatacggcgtcgccaacctgcgggccaagagcctgcgggagcgggcccggctcctcatcaacatcgcccaccccaagttccgggatcagctctgggaagcttactacgaacgctatggcaaggaggatcagtaatatgtccgagaaaaaaattgaggccgtcaatggacataccttacaaaaggtattcctgtccgtggaggatcacatcgccgttatgaccctccacaatcccccggtgaatgcggcagacggcgtggtgcaggaggagatcctgctcctgtgcgactatatcaaccatgaggatgacatctgggtgtgcattatgcactccgacatcaaaaccttctgcgtgggcgtggacatcaagcgattctatcagagcatcctggataaggatgtcaccaatacccaggaggtctattacgatggtgctcaggccctctatgaactgcgggttcccctgatctgtgcagttcacggccactgcctgggcggcggcgtgtgctaccccgccggtgcggatatctctatcgccgtgaaggggaccctcttcggcgcaccggaggcaaagctcagcgtggtgggcggcagcgcccatctagcccgcattctgccccccagatccagcgggatatgagctactgcggcaccttcatcaccgcagaagagctccacgacaagtacggcggtgtcaccatggtggtagacacgctggaggaactgatgcccgcggccatggacaaggcgcgggagttgtgccgccgtggtcccctggtgctgcggtacctgaaagcctgcatgaatgagcaggaggatttccagatccaccggaaggatgagctggaggtgacttacacccgctacatggctcgtcatgcggatttcaaggagggtgtttccgccttcctggaaaagcgggagccgcagtataccggccagtaaaacacatcccccatacaagactttaggaggaaggatcatgagaaagaatgcaaaaaaactgtttgcgctgattctggcactgtgtatgtcgctgacgttgctgactgcttgcggcggcgataccgctggcagcgattcaggcgtgggagagagctcctccggtggcgagacgatcacctggcgcctgcagagcagctactccctgaattccctgcagggcgatatggccaccaacctgaaggaggctctggagaccgctaccaatggccgccttcaggtggagctgtatgagccgggcgctttgtgccagacctccgatatactgacctatctctcgcaaaatgcctttgactgtgccgtcatcttcggctccaccttctccggcctgattccggaggcggatctggcctgcggcatcccctttgcatgggagagctccgccgaaatctatgacgtaatggagaactatgggttgctggatgtgatccaggaggcctacggagaactgaatctcaaatactactggaatgcccatgagcccaactacaacgtcctggcaaacttccaggtagagagcctggaggacttccacggcaaaaagatccgcgctctgggcgtgtggggcgacttcctggctgcgttgggggcctctcccaccaacatcgccggcacagaggtctatcaggccctgcagctgggcaccattgacggcgctctgtatggatggtcctctctgagtgactccaacaacatccgcgaggtggcgcagtacgccctcagcccctccatgtgcttctgccaaatggccaccgtggtgaatcaggacagcctgaacaagctccctgaggacctgcggagcatcgtggacgagaccatccggctggccaacatcggcgtcatcggccaggcccatgtggttggtacggagaaaagtgttcgagacgctatccagggcggctacactgagctgtctccgctgcctgatgacgtcctggccgagatgcgtgaaattgctgtcacccagacctgggaagagctggccgccaagagcgagcgtatggcccgcggtatcgagatcatcaagcagcaaaaccgtgactatggccgccaagtggattactgagtccgcgcgttcctcacagaaaaatagaattcaagagaagggaaagtgagacatgaacgcactattgaaattatcaggcggcattgacgccattaatcggaccattggcagaatcttcgcctggattcttctgcccatgatctgcctcaccgcctttgaggtattctcacgttatgtcctcaagtctccaaccgtctgggcatgggagctgattatccagatctggggcctgatgctgatggcctgcggcggatactgctactggaagggcggcctggtgcgagtggatctgctttataataaattccctgtcaaagtccgctgcggtatcaatatcgccaccgccattctggtcctaatctgtatggggctggtatttatctacggaataaacatcttcctactgtccttccgcctcaatgaacggatctcttccgtgtgggggtctcccatgtggaccatccggttttgggtgcctctgggcgctgcactgatgttcattcaagccatcagtgagcttatcaagaatgtagccgctatggcaggcaagattgaactcaccaacaactccgacgaagtcgcggaggcaattgaaatcgtgaagtccgctgagcatctgcctgacgaaaccggaaaggaggacatacagtgagtcctgatattatcattttgctgctggggctggtagccctgatggcgctgggcatccccatctgctttgccatgatgagcgtggcttcagtcatcctgctggtgttctacggctctggcctgctgaatgtgttgaacgcagcatttgtctatcagatgcagtcggagtccctgctggccatccccatgttcgctctgatggcggcgttcctccagacctccggcatcggcggagacatctacgaattcttccacaagtggcttggcggtatcaatggcggtctggctatggccacagtggccaccacggcagtcatcgccgctatgagcggtgtggcggccaccgctaccatcatgatggggctgattgcactgccagctatgttggaccgtggttatgataaagcgttggccactggccccgtgctggcaggtggctgcctgggccccattatcccgccctctaccatcatgatcatcatgtcttcctataccggcgtgtccgcaggctggctgtttgccggcggtgcgttgcccggcgtaggcttggccctgctgttcatcatctatatcggcatccgctgtgccatcaatcccaagctgggccccggcatccccaaggccgagcgtccctcctggggcgagaagatgcgggtgtttaaaaaggtcatcgcccccattgccatcatcgttctggtgctgggctgcatctatgccggaatcgcaacacctactgaggccgccggtgtgggcgctttcgcctccatggtgtatgccctgattacccggaaactgaatgtgaagaatctgcgggcctctctcatccagaccatggaggtctccgccatgcttatgtggattctcatgggaggcgccgcttacaactccctggtgaatatcacccgcctgtctgacgtggtagccgctgcttttgcaagctccaatctggacggcctgcccctgatgctgctgatctttgcgctgttctttgtgatggggatgttcctggacactacgcctatcatcatgattgccattcccattctgctgccggtaatccaggcttcttccctggacaccaacgccaccatcctgattctgtgtgtcactctttgcctgggcatgattactccgccttttggcatcaatatgttctacttgcagggtgtggcacctccgggagtggacaccaaggttatgtacaaggcggtcatgccgtatgttattattttcctggttgcttgcttctttatgatgctcttcccggaactgattgtcatcttcccgaacgctgcgatgggatattgatctggaagaacatcggagctgcaaagacccagggcccgttccgtttgattcatgcaatgtggtgttaacacatctcccccaatatgtaagcataaaccgttagatgcatttcttgtgctccttatttcggcatctttccccgccccatgacttgccacagattgctgaaaaccgtcatggagtaggaagaaatgaattccgggttttggacgattccaggtcccacaaaagtccggaaaacgttgcggtgcagcggatagagaaaacgatagcagtttataacccggaggtcgtaggttcaagtcatgccccgcaatcacaaaaccgtctgatttctatgaaatcagacggtttttctgcctttgcatccaaaggtttccggagaaataacgcgattttacaaaatttgcagttgccccaaaccatgacccatacagggcaaaaaacgtgccttggcgcaactctgccgtgccaaggctttcctgctgtttggaaccatttttccactttcagattgccgccgtcaggaccttctccatggtcctagccgcctccttctgggccgctgtggtgacgggggcataggtatgcagggtgaaccccacgctgaagtgccccagcatcccggatatcgtcttgatatctaccccgttctggagggccagcggtgcgaatgtatgccgtaaatcgtggaacctgacccgaggcagacccgcccgtctcagcacccggtggagtatatgcaggacgctgtccggtgagatagaccgccggtgggtgagggaaacacccagggactgctgacgtttttttcctctgctgtttcagaacctgaatggtatcctccgccggcggcagcgtttggttggcgtttttcgtcttgagcgatgccgccacctctccgttgatgcgagcaccatgccgtttcacccaaaggccgccccggtccaaatcaatttcctcccatttgaggccaagcaattcgccttttctcaatcttgccgccagctccgcatagtacatctcgaagacgccgctctccttggcttcctgcagaaaggaggtcaactgctcgacgggcaatgttttcatctcccgatgttccagcttcggtagggcgcagccctcggtgggatcggtggcaataatttttttctccttggccggcttcatggctgaggcgatgacctggcagatgttccgcaccgtcttgggactcagacccctgggctgccgcttgctctcgactctgtcgattcttccactgttgagtaattttttgcagaccttctgtaattccagagaagtgagtttttccagcggaacttcgccgatatccggcttgatgtggttgtcgatatacccttggtaggcatgatgggaggatgatctcactttgatctttgcatagtttttgaaccacttatccatccaagcacctactatgtactttcccatcatggtcacgtccaggcccttgatttcttcaatggccgctttcgggtttgcctctccctgggtccggcccaggacgttcttgtagatcggctttccggcctccagatcgtgcccggctgtgtagcgaccctcccagcagccaccttttctttttctgatgttgcgctctccgtcggcccatttcttcgccatggcattcattttctttgcaataacacaacatgccgcagagaagagaaaaacgtcaatgccgctatttcatacccagaacaacgccctttcaaaacccgcaactgcccgcagtgtgggcagttgtgaccgccctggtgtcgaaaaggcgtcggggctttcttctgtctgccgggtgacggcgctctctttgtcaacggtgttgtaatcccggcattgagtaaaagcgcttttctgatttctccccttcggccaacaggttgccccaagtggggctgggcttctgcccggaactgcggccggcgtatagccgggtgcgattcttgccccactctggtgggcacaatttcactttccattttatctcgtggttttttaaaagattctgaaattgcggaaggggacggctctatctggccgcccccttcatcatttagttcagtgaaacaacgttttagttgttaaaatgcggtcaaattctggcatgtagcttcaaactgatgcaacctagacaacagttcacttcgcctttcttctgtgcagaaggcggcgtctactgcataatactgcagctttaatagctcctcaattttccagtgatactgttctgccacgcgttggagctcttgacttagggaaacacgcagaagctgcggatcatccgtgttgactgttaccgatatccctctactatacaattcacccaacggatgattgccaggcgtatagaggccgcctgccacattcgacgtatagcagatattcaaaggaatccgctctctcaggagccgttccagcagtttcaagtcctccactgcccgcacgccatgatcgattcttttagctcccaacagttcaagagcttcctgaactccttccggcccagaggactcgccggcatggacggcaatgcccagcccggcctccgccgctctcgccagtaatggcgcaaatctctggttggagtcctgcgagcaggcctcgtttccgtcgacggaaaccccgaccaaccgcggatgtctgtgggacaagatccactctatggtcctgcgggcagacgctgtatcctgttctctgcgcagggacacaagaagccggcaatccggcagtccatctgctccggcctggtcaaaaccttccagaacgcctgtcaacagctctccggtccgaatgtttttccaatggctgggattgacgatgatttccgtatagaggataccctgctcctgggcgtactttgcatggcggtatgcaatctgctgagcagtctcccgattctgcaccaaactgcagatccagtccagcaggtcaaggaagtccgagagacctgagaaatcgaacaggtgctgacggggacgtggcagggaaatcccctgcatttcggccagcaggcagacggtttcaggatcgaatgtgccctctaggtggatgtgcagctccagcttcggcattcgctggatttgttccaacgtcgccataccggtcattgagcaccttcctgctggaagcgttctacccaggcatcaaactgtggcaggagatgctgtccgctgatggagtaggcaaatccgttgcggatgatctggatcagctctgcttccgtcaatcccatcttctctgcatccagaatcaattcctctgtcatagagcaggtataaggcgggtcatcagaactgatggagaccggcacgccggagtgcagcagggtgaggagtgggtgtgcctcaaaactggcggcagctccagagtaaacatttccggaaggacacatggcacagagaatctgatgttcctgcagatattccatgagttccggatgttccgccgcccgacagccgtgatcgattcgctgaacatcgagcttcagcagggcatcccagatgttgtccgcaccgccgtcctctccggcatgagcggtaaggaacagccccatttcctttgcctcccgatagctctccaaatgcttgatacagggatgaccgttttcctcacagtccattcccagccccgcgaccatatccagatagggacggagcgccttgacaaaagacaggcaccgctcgctggaaagggtccggtccagtccggcgatgtagacaatctccacgccataaagctttttcgcttttttttgtgcgctgcgatacccctccatgaccacttttaggggaattccccgctcttcgttcagtggataatccaaatgcagctcttggtagataatattttgacgctgatcctcttttgccaatgccaggacaactgcttcatagtcttcctcatggagacaaacggagttcaatgtccggtcacagatcataaacccatccagtccctttctggagattagatcctgagaccagaccgcaatttcttccgtggagtggactggcagcttcacatgatttttctccgccagctccagcgcgagagcccaggggatggagccttcaatgtgaatatggttttctgccttcgggatttcctgcaacatctgcttttgccgagaagttaacatagaacaaccctccattccgtcaaaaaatagcgtccagaatcaagtacatcaaaaagactgccgttaggatcagcatcgtgggagagagctgctttcttctgccggtcactgccatgcagagagtgtagctgagcatggaaaaaagtacaccataggcgatattgtacgtaaagggcatggctgcgacggcaaagaaggccggcatagccacggaaaaatccgaaagatccaaagtggagagtggctccatcatgaaaatcccgaccatgatgagcgcaggcgctgctgcaatgctgggaatcatcagaaaaacgggggagaagaacaacgtcagcagaaagagcaggcctgtactacaggcagtcaggccggtccgcccgccagcggcgatccctgcggcactttctgcgccgtaaatcgtgaccgtactggttcccagaaccgcgccgactgcagcggctcctgccgagacgaacagagcttttcctgctcccggagtcttgccatcctcatccaccagtccggccttggggcgatccccaagaacacacccaaactgtcaaatagatctacaaataaaaagctgacaatcgcaaaaatggttccaagaacgaaggggagcggtccggaaaacatccccctgtaactcaactggcccagagtaggggccagagcctctgctggattgtcaaaggagaaaacagaggtcggcagagtggtataggccgcaccagtgacggggtctttcacaaacagacccagaaccgtcaccagaagaatgccaatcagaatcccacccttgacctgtcggatgaccaataccgccgtaatagcgatgccggccagcgccagcactgtgccgggattgctcaagtcgcccaccgtcaccagggtgctatcagacttttgaatcaggccagcggactggaagccgcaaaacgcaataaacataccgacgcccgcgccaatggcctttttcacgcagtctggaactgcgtctacaatatgctgctgcgtcttaaatgcactcaaaagcataaagacacagccggatgtaaatacgcacgccaagccgttctgccaggaaaggcccatgccctgtaccacggtgtaggccatataactatttaggcccatggctggccccagagcaaacgggaagtttccccacaggccgatccagaggcaaccgatgcatgatgaaagcgccgttgcccagaacaccgccttttggtccatgcctgctgctgcgagaatcgttggattcaataccataatgctgacacaggagagaaaagtggtagctcccgcaatcaattctgtccgcagggttgttccccgttcagacaaatgaaaaactctctcaaaaattgatctgttcccaatcgtagaattcatgatttcccccttcctgtcatgccgcctgatttgatggcgtccctgtgcgcacaggtgttagtgccatcttagaataggaaaaaacagatttcaactgtctgtcaacaagtcagacgacatttttcataccacccttgtaagcgtggaaattcgggaagattccaaggagttgtccgaccaatttgaggacctttcttgctttcttttcataagttgtatacaataaaggagcggatcccatacatctgaaaagaaggggattgtctctatgaatacacacgaagtcccgctgcgggaacgtgtccgggcccagcttctggagctcatttccgaaatggatctgaccgtcaacaccagattgctctctgaaggacagctggcagcgaaatttcaggtgagccgcagcaccatccgtacagtcctcagtgacttggaagtggaaggcaaggtcatccgccggcaggggagcggtacctatgtcaattcacaggccatccaggtgaatacaacgctgtatcctcggatcgacttgcgggaaattgttgctagaaacggctattccgccaggagtgaggtgctgtctgtccgtcagattccagcgggaaggcagtcccttttgttcaactgtggcccgacacatcagctgcaggagatccgcagcctgtattacgcggatgagtttccatgcatgtactgcattgattgtatccgagacgggcggatcacggaagatcagtggcggactccggagcttgcgacacagtccatctatgagtttctcaaggaggcgggcaatattcatgtaaaatgggatatgatgcgcctccgggctactaccagcggtgaggttccagagctggcggtttattttgaggtccctgtgggaaagatccggccctttattcttttagagattacgaattacgatgacaaaaataacccggtcctctgtggaaacatctatgtggatacggagcgaatcaaattgaatcttgtacgtgatttggggcagctttcataaggattgttcctacagatcttttattgacagtctaatgaaagatggtttccgttttcaggttccctgctttctcgtgatttagaacctgaccccaattgctgaaaatcgctgcggaacggaaagcagctcataacccggagctcatggaacctaactctggcagtcccgcccgcttcagcaccgggcagagcatgtgcaggacgctgtccggggagatggggcctccgcgaccttgtcatcgattcgggcgacctgctgttttagccggagtttgcctttttccgagtcaatattctcccctttgaggtcaaggagcgatcctgtcgaaggccggtgggcaactctccatagtacatcgcagacacgccgatgccgtttgcctctctcaggaaggccatcagttgttctgccggaagtgtgatcggtggcgatgaactggtggatgctccgcactgtcttggggcttaggtccttagcctgcttttgctctcgaccctatgaattctcctcctgctgatcagcagtttcctgcagaactcctgcaactccagaaaagtgagcttttccagtggaatctttccaatgttgggcttaatgtggctctgcgctttaccatggtgttcactgttttcgcagcaacacaacatactacggaaaacagaaatattcagggactacggtcactgttggcttaaggttaaaaaagggctgccagcggcagccctttttctttgtgtagcgtatcaatttttgacccggggataccctttttcgctgtttctatagctggcttttcttcttcgccattggatgcgatgtctggcatgcatgagggggatgtactaggccggagggcactccgctccctcgatccctgcttttatcgcttactggctcaccataatacgacaagcatggggggaaggctcctaagatcatctcttctaccatgcagtcccattaggactccgccagtcaaagttccaaagaaattgccgctaaacacaagctatgcagtatctatacaccaataagaggtaattttcatatcttggcagttttggggcagtgttgttgttctcgaagatagttgtcgggtgactgcctgctgtctaatctcccatgcgcggttgccgtcttagtcctccatcccattaggccggatcaccaacttgagcacattatggtccaacacatcttcgatggcctgcgggaattcttccagtggatagagccgggttatcagtcggtccgttttcacctttccggtatccatagcatccacggcacggccgaattgatgaacctggcagtaggacgtgtagtactgcaattcattgcgataaaaatatgcggggttgatggagatgtcctcatcatcctttgtggaactgaattgaagcagccgaccgccctttttcaaaagctggaaacaatccggcaggacagaggcgcttcctgtggcatccacgatggcatccacgccgtaggggaaccggtcaaacactgctttggtgtggactgcgggatcgctgcggtccatcagaatggtgtcaacgccataagcgttcagaacatccaatttggactgagtgggagccaggcagatcacatggtttgcgttggagtgtttgagcagctgtgccagaatgatgccgttcggaccggctccgaaaaccagcacatcctccccgtatttgacgtcaaggcgatccatggcgtgaatgcagcaggcaacaggttctgtcatacaagcctcgttgaaggagaggtggtccggaatccggaacacggtcttgtcctttacttttaagtactgggcaaatccgccggggatactgtgccccacagactggaagttcaggcagtgggcgtacatctcctgctggcagaagtagcactttccacaggggacagcattatcggctgttacacggtcgcccacgttccagcctgtcacagcggagcccacctggtagatatagccggcgaactcatgaccggtggtgatgggatagcgtcccaacttgtgaccggttgtatgatgacggcggtctgcgcctttgcagatgctggctgccatgaccttgatgacaacctcatcctcgccgcacacaggcatcggtacatcccggacactgcacacggacgggcggtcgtagaccagcgctctcatggtttccatagactttcctcctttaagcgatttgaatgggtgcttccactccttgaaacagacgaatcttggctgctgccacgtcgtgtacacactgagcggcggcgcggtacatggcatagatattgcgttgccccactgcagactccagtccgcacataaaggcatttcggatttcagttgccacgttgattttccgaatgcccagtgcaatggaccgacgaatcatatcgtccgggataccggaaccgccgtgcaggaccagcggagggggatttaacgcctgacactgctgaaggcgatcaaagtccaaccgtggaagtccctggtacattccgtgggcattgccgatgccaatagccagcgcatctacatccacctgctggataaagcgggcaacctcgtccacatctaccaaattgtcgcgggaatggctgatgccatcctccacgccgtaaattgcgcccaattcagcctccacagagacgcccactgcgtgggctgcctttaccacttcctgggtaatacgcacattctcttcaaagggcagatgggacccgtcaaacataacagaggtaaagcctgcccgcaggcattggattgtttgctcgtagctggctccatggtccagatgcatgacaaccgggaccgtggactcgtcggccagccggcggactacatccgccagatggtgcatctgtccagcctggatggccccctgaccgatggtcagaatcacggggcagtgatactcttctgctgcagtgataatggcttccggtatttcaatattgtcaatattgaacccagggatggcggttttagactgggtggcaatgccgagaacctcttttaatgttgccaatggcatatggctcgcttcctttcttgggtgtcatgagatatctgagcgaaaatccagcggctggtgggaatgaataaaatcattcactgtcgcccgactgcccatgcctgccgttgcaccaaccgcctggattgccaaagcggaacaggcgcttccaagagttatacagtcctctgggggcaggttctctcctacgccggtcaaaaagccggcgcagaaggcgtctcccgcccctgtggtttccactatggaaaggccctggtagatgcccgcaaaaaaggcggtttgacgatttttgaaataggaacctcggctgcctagttttacagccacgtttttgacgccgcggtccaggaagaaatctgcaatagcccgaggatcctcggtcccggcaatctgggaagcctgctcgatgcttggcagaaaatagtccagatagggccagcaggggtctagaattcctttccaccggccgctgcggtcactggtgacgtccatagatgttattacgccgcgctcctttgcggctttcagcaattgggcggagccctcgccgtcaaacttcggcagatgaaaagcgcccccaatctgaagcatttctgcccagtccagcagagacagatcacagtcgtcaaagcagaactctgcgctggtgcccggatcctgcaggaatgtacggtcacctttgggattgaccaggatgacagattttgtttgccgagccgtggaggaacggacggtatgggatatgtcgattccggcagcttgggccagagaagccacatagtctcccatctcgtcacatccaagccgccctaagtaggcgacttggtggcccaacttggcaaaattaattgcgttattgttggcgtcaccgccgctggtaatgcggatgtctggcactatctgggtatcgttttcaaaggggatctgttggactggacggacaaaaatgtctaccagcatttcaccggcgcagatgactctcatggaaggcgcctccttaaaaggcgtgcatagcctcaaggcaggcatccatagtggtcagagggctgagttcaaaggcgaaaataccgtcgaaaccaagttcgtccaccagcacatgcttgaggtaagggtagttgatctcgccggtgccgggttcatggcggccggggacatctccaatgtggatatagccgatgatgtccgcgttccgccggagggtgttgaccaaatcgccctccatcagctgcatatgatagatgtcatacagcagctttacattgggagaccctacgacccgaatgatatccgcagcagagtctgaagtagtcatgtagtaaccgggcttggcataggtgctcacaggctctacttgaagatagagaccctccgcttctgcgattttggagatctccagcaagttcttggtggcacaggcaattttggtgcggtcgttcaaatcgttgccgtcggtacacattctgccttcctcgcccaaggcgttggaatggatcaccagatttttacagtccaaaaaatgggccgcttctacagatcgcttgaagtattctaaaaattccttgcaatgggcgggatcaatcaggttgtagtccttgtctccagagaaacaccccagctgaagccggttttcttccagtagggatttgatcttcttgatatcatgctgtgcccaggaaccgaattccacatagtcgaaaccggtttttcggaccatggggaaccggtcgtagaagggcagatctacaaagagcttctcgatacagattgattttttcatatgacctccacgtttaattgccagactgcttgttggtagaacgttttttccagagattcaggaaaatgggagagagcagggagatggctgcaatagccagcagtactagggcgatgggatgagagaggaaaatggagaagctcccgtccgagagcaccagagtgcggcgcaggttctcctccaccgtgccgcccagaatcaggcccagaataatgggcggcatgcagaagtccaacttgataaggaagtagcccacaatgcccgcaccgatcatcagaaacacatcgtagatattgttattgatggcataagtgccgaccacacagaagacaaacacaatggggttcagccacttcataggtaccaggctgattttggagaagatgcggatagcaccatagcccaacaagcacatgaagacgttggccataaacagagagataatgatggagtagacatccaccgtctgggtgctgaaaagcagcggtccaggtgtaatgccctgcatcatcagggcacccagcatgatggctgtgacggagtcaccagggatgcccagggtcagcaatgggatcatggcgccgccggagacagcattgttggcggcctcgggagcggcgatgccttcgggagcaccatggccgaactcctccggatgcttggaccagcgtttggactcgttatagccgatccaggaggcgatatcgccgccggttccgggaatggcgccgataatggtgccgataatggagcacatcaggatcgtaggacttgtccgcttaatatctgatttagagggcaaaatctggtccagcttcttgcgcttttcccgtttgtactccttcatagattcctccgctgtaacaaggcactgggagaaggcgaacaggccgatcagcagcgccacgaactggacacctccgattaggtaggtggttccaaatgtgaaccgcatagtggcagaggttgcatcaatgcccaccgtgccaagcagcaggcccagtatagcgccgatcagacccttaatgatggagtgagaggacacggcggtgacgatgctcaacccaaacacacccagagcaaacatctccggtacgccgaagttcagcgcgatcttggacagcagcggagcggtgaagagcagtgcgcaggcagagaacaggccgccgaaggtggaggccatagtggaaatactgagggcacggccgggctgccccagtttggtggccatgggataaccatccaggcaggtggcggccgagttggcagtaccaggcgtattgatgaggatggcggtgatggagcctccatagatggcgccgcagaaagtgcccagcagcatcataatgcctgcttgatcaagggaaaaagtaaacgggagtagaatggagaccgccataacggcagataggccgggcatcgccccgcacaggataccgaaaaacacgcccaaaaacatgtaaattaggctggtaggcgtaaataccaacgctgcagcttgcagaaaagcatccatagaatcgctccctccttatcaagagaacaacgtgcccataggcagcgggacccgcagggccacatcaaagctcagccacacgaatacacagatcacgacggtcagtcccgccaggagtttgacattacgctcaccatggataaacatacatactggcaacataaataggatgccgatataaattcccaggaaataaataattgcaccagtggctatcagtgtcagcgataccagcaccatccgtttgaatcccacagtcttaaatgcaaatggagaactgcgggtttcttttttgctgaaaagcccctggagaattagcacgatggacagagatcccataacgaccgacaggcacttcggccagaagctgggacccagtgaatctgtcatcagcatgctggtcattcccagggattccacataggcgaagatcgacagggccagaaagatgatccctgtgactacgtttgcttttttcaacggtatccctcccgcaagaatgttgcaggcgcacggaacaggacctgttccgtgcgccctgattacgtgactacgcgatatggaaatgattcttcttcactcagccagcaggccgacgtaatagttgtacgcctcttcgcagtactgggtcataccctcaatgtcccataccttgggcgtcatcatctgggattccgtcagttccgcataggtttcggaggccacgccctcattcagcgtgttatgcagccactcaatgatggcgggatcggcatcggaccggattcccaggaagcacacagaccgcagatccatatcgccgcactcctcgggataggtctgggcgagagagggggttccaggtagagagtcggactcctcggcagaagtaacggccagaagcttcagggtgccggcttcaatctgcccggccacgccgctgacgttgatgaaggtcgcatcgcactcgccggttaccacagccagagcgcagtcgttggaagagtcataagttacagtccgaatctgacagccgaaggcgttggacagtgcaatggttgccagaccgccgggagatcccagaccggtgatcgccacggtaacggcgttgtcgccgctggagagtttgttaatgaagccctccagtgtgctgcaatccccatcggcggggccgatcaggcagtagggctcatcttgcaggcaaacaatgggagtaaaatcctcctggaggacaatgtccgtggcaccgatggcacggttgataatcaggtcaccgttgacccccacgatggtgtagccgtccgcagcccgggtcagcccctgctcggtgcccaccagaccgccgcctcccgccacgttctccaccacaaagttcacattgctgggcagcgcgtcctcggaaaggctttgaaacagggcgcgggagagttggtccatcgtaccgccggcaccataggggatgatgcaggaaatattggtggtgggataatccggtgcggcggtgtcctctccggaggagtcctggcccgaagactgttcgccggtgccgccgcaggcggtgagactgaggcacatcaatatcgcgagaagcaaagcgattccttttttcatgttaattctcctttgttccgtatttatgtatcccctgccggatcaatgggcggggaatcacaacttgatgacggccttgaccacatcctgacgctgataaagcgcggcgtcaaaggcctcctgcacattttgaaaatcaaattgatgcgaagcgatggcttttacgtcaattcgaccggtggataccgcccggatagctgtgggaaaattgttgtgatagcggtaaatggtccgaatttcaccctccttatacatcaaatccataaagcggtaaggagtttcgccattgatattgccgacaaagacgatgacgccgccccgccgaaccagatctgaggtttccgccgctgtgtgggagttgccggcggtttcaaataccacatctgcgccgcggccctctgtcaattccgtgacccgtgccatggtatcctctgtgctggcatcgataactgcatcggctccaagttccagggctttatctaatcgtttggagaagaggtcggaaacgattactctgccggccccccgggctttgcaggccatcatggtgagaaggccgatgcacccggcacccagaatgaccacatcctgccccaatgtcacatcaccccggctggcagccgacagccctacggccagcggctcgatcaaggccccctccagggaggagacattatccggcagtttgaaggccagatgcgccggtatggcagcgtagtcccgcagcattccatcatagggcggaactgaggggaagcggacatctttgcagagattatagcgtccggacctgcactccgggcaaaccccgcaagtaatctggggctcaaagcagacccggtctccaacggcgacattttgaacacccgcacccacctgtgtgaccgtgccggcgcactcgtggcctagaataaagggcaggtcaaaagcctttcccttccgcatgccggattcaaagaaatgcgcgtcagatccacagacgcccacatactcgattttcagtacaacttcgcccggctgcgcttgcggcattggaagctcccgaatttccatcttcccaggtgtgaccatgtaggcggcccgattccgtatctccatgaaatcctcgctccttttccccaaatacttactcactaattctgagttgccaaattttgtaggtattttatggtaaatttatgagtatcttttagataattatagcaaatattgtggggttttcaatatctaaatgtgataaattcttgacgaaactttggccattttgaataataagagttttatttacagcaaatacctgtgcaaaaaaattcttattttcatcatttcttgattattttgggaaaaatgattgcataatggcaaaaatatgatataatttacccaaattataccgaataatttgctaatattataggaggaatccttatgcgggccgagcgccttaatgcgatggaacaatatattttggggaaggaaaccgtttccctggaggaattgtctacgcaattttctgtatctatgaacacgatccggcgggatgtcatggaacttttgagccgtggaaatatccgaaaagtctatggaggcgtctcttccaccctgatcaaccggccggtgggcttttctgtccgggcccagaaaaacagccgggccaagcagattatcggacggctggcctcccaactggtcagcgatggggcgtcaatttttctggactccggttccacaacgccctatatccttcagcatatcggcgagaaaaacggcgttaccgtgattacccacagcttgactgcgctgtatgcggcctcgtctttgtccaacctgaacattattgcgctgggcggtatttacgcccccgccacgtcgtcctttaccggtatttccacactggatgccctctctcgcctgagcattcagacaatctttatctctgctaccggcgtttcaattgaaaacggccttaccaacagtacttatctggaagccgagatcaagcgcagcgtggtacagcgaggcaatcgggttgtcctgatggcggaccaaagtaaatttggacattccgctgtgatcagcttctgcccatttgagcaactgtatgccatcgttacagactgcttgccctctgagccgtatctggaggcaattgatcgctatggcatccggctgatttgccctggtcacgaaagtgattgagtgcaatgcctggggggagttcaacggaaaatccgtgttctgaatccaaaaacagcgttttgatttacttttcctcaattttttcgcatcatccccttgtcttaatactactgggcttattgttaggccttgttcaaacgagatggcagcattcattttgcattcgctatttctacaggaaagatcgacaagtagcgtctagacacatccaataccctgtcctatacggggcaaaaacgatgcccggacgcggcgtctccgcatccgggccgtgccgacttttcggagggcatttgctgggactttccccatagctttcgccgcccccttctgggccgccttggtgatgtgggcgtaggtgtccggagtggagccggccgagaagtggaccggcatctctttcagggacttcaccaagtacatggcggtcaccagcgacagcgggtacaccatcaagaaggggagtaaaatcacagtcaaaggaatccgctgagaaacgagacaagccccgggccttttggcccggggcttgtcattaagctgttttcaacgcagcaaagagactcaattgagggtaatcgtgtaagttgcgtccgctgcgccatccaggtgcagaacaaccgtcatgctatcggtgacagcggtagtatccttctcgccataaatcgcgccgaaggggctcacaacctcgaagtagtcggcagcatttccaccatcgacctcgagagcagcgtacaagtcagcaaccgtagcgttagcggaagattcgatagtgattatcttggagctaatgctcataacggaagaagaaatactatccttaaccttcagcgtgccagagcttgcagctgcaacctcaacctcaacagtcactgtcgtggtcttggaaccatcggaagaagtgaccttgatggtataggtgccctcacccagagcggtggtctgggcctgggtatccgcatccacatcggtagagccgttcttagtcaccacaacctttgcaccagcatcgttcggcttgataacgaacttgggctgatcgttctgcgtagcaggcagattgatggtgttggtctcaccatcaccgagcttggcaacagtctcgcccttcacagtaatgctagcaatactggcatcattgctgagctcagcggcttcagtagcctgggtcacggtcacatacagctcttccagaaccttgccgttatcagaggtcttgccggcatagtcataggtgtaggcatagcccttcagcgcatccaccagctccttggcggagatattggcggccacctcatagtcggcatcctcatccttgttcatgatgctggcgtctctgtcatcgcccaggtcaccaacggtcaccaaggtgatagcggtgtcctcggtcaccagatagcggctgccattaatggtcagggtgccggcgctctggctgatcgcgctggtcttgtcagtgtcagcaatcacgctgccgcctgcggtggccgcctggaagtcggtcagctgaccgtcggaattacgggtcagatagtgggcaacgccatagtagtcattgtcggaagtgatcttgttgtcagcaacaatgtcctcttcctcatcaccgttcagaacagtgtactgatgatagacctcgttgtcggtggtgacatagcggccatcataggacagaacatagaccagagtggtctcctgctcaccggagatggtggcatcgccgtcaatatcaatatagatcagagcagcatagccattgtcacgcaccagagcagagacagcagcctcactggaggaatccgtcagctcaatggcggggaagttcttcacgccggtgtagacatacagatcatcgttcttgtcgctgacaatgacgatggtctcgtcgttggccagagaaagatccgccttggtagtgctgttggaatcgttctcgaagggagcgaccttgctgttttcggaaacagtccccttaccgctgtagctggcaatctcctcgtcatacttggactcaacagcatacagagtgtattcgtcagcagagttcttgctgtaggtgaaccagccgatctgatcggcgtcggttccccaacgagcaatggtggacttgctgctcacctgctcaccggccttcttatcataggccttgtccacgacgatctcgtcggtggtaccatcggggaagatggcgttggccagagcgcgggaggtagaggtcatgccgctgctgctgccgaattcagcgatgtacacataatcgctcaggacaacagactcatccactgcgatgacatagccataggaatccagcaccagggaagcctcgcggcccacattgtagctggttttcttgatgttgtcggcggtggcggagtactcgtacttggtgccgcccatggtcacattgctgccgtccttatagccctcaacagtgccgttgacaacctcagccttgtcaatgctcttgacctcgtaacggctgttgttgttgacggcggtcaccaggacatagtcgtcggccttcaggtcggtgatattggcgaaatcgtccacatccagggtccggctgtccaaggtgatgtcggtgtcatacttgctggagtcagtggtcaggctgaccgtctccttgcgggtgtcatagtcggaagcggcctggaagacataggtgcggacggtgacgatggtgacatcattggtgtcgtcgtccacatagatctcggtcaggtcgccgttggcagtgttgttgaccgcgccggtgttgttgcgctcaacatagtcctccacgtcagcggtcttaacgggcgtttccacaccgtcgaaccacacggtcaggtcggacttgccatccgtcagatcgttgtagactgtgcggcccacagcttcatacacatcagacttggagaccttggcggtgtaggtgcccaccagctggtccatattggcgtaagtgccgatctcgtcggacttcagagtccagatgttggaaggacggccgaagtcatccgcttcgccgggtgccttctgcagatcgtcaaagtaccgctcggcgaactgcatcttctcgtctttctcaatagtgttgtccttctcgatggggttctctacttctttacgagtagaggtggaggtgatctccacgccgcccacaacgatggtatccttcttgtcatactcgaccatggtggcctgcagcatattgaaggcgtacagggcggcctcctgacgggtcacagcctgggagcccacgaactcgtcgttgccgtcgtccagaccgatgccgctggcctgcttgatgacgctgacctgccagttggggccggtgtagccctcgatggaactgtcatagcccagggcgcccagcagcatcttcatgaacgcgttgccgctcagggtaccggtgggacggaaggtgccgtcagcatagccgctgatgataccctgctgagagcagtaggtgatgtagcccgcgaaggtgttggtcacgggaacatccttgaagggggcggtgctggccgccagagcagatgcagtggtggggcccaggatcaggttgcagatgatcttggcggccgcgccacgggtcaggacatcatcgggacggaagtcgccgtcggaataaccgtcgacaacacccagggcagagatcacatccacagcttctttgtaggtgatctcgctgccgtccgtgaagtccttggcgcccgcgctgacagtgaccagagacatggtcatcaccagagcaagcaccagtgaaagaaatttcttcattcggatttctcctcctttaaaagatttgcagagagcttttgaggtccaatctccggaccggcttcatatgcgcaggggtgtctcttcccgttgctccggcccagagcggaccacagaagttcctttctgcgcgttcactttaccccaggagaatgctgctgtctacgatttgccgggttttgttaaaaaagtgaaataattactggatttcttgcgcttgccatgaaaagcaagtgtaaccgatgaaaaagttcccaaacaaaggggcgattccggcaggtctcctcataggggcaaaaagaaagatgccgtgaaaacagattctctgctgccacggcatctttcttctgctatgtgggatgcattgcccaacaggctacgattctttcagatagtatttctggccgactttaatcaggtttccagaatctacttcatgcttgagcagcgcggagcattgctcggtttcaatctgcagggcggtggtgatgtccttccgacaggcaaagccctccttcttcagatattcgtagagggcttcctgctgtcgttccggcggaactacggaatccggtaagtagtatttatagcccacgcggaccaggagacccttatccagcatggcacgcagccgctgatacgcagcggatttggtctggccatataattccatgatctggctgcgtgtgatagggccactgcggcgaatcgcctctgtgatcttttgttcccaattgctcttttcgtatctggtccagagatctcgcaacgtccagttctccatgccgccgcggatcagggcggttcttgtgatcctagacacccgcgaaacgtccatgggtttttttgactcggcggagagcaggacatggagatcctccgtccgcttctggagccgctttgccaatattcttttggctgccgctgtcagcggtacctctccttccggcaggtgaatcagattcttctccagatccacctgatcccaagtcaaggacacaatgtttttagcggtcagccccatgctccaagtaagccagagtaccaagccggcaggagtgtctttttccgcctgcaaaatcttccacagcttgaactcatcgatgtccccggacttctcactatgcttggggccagctcttccgttcggcagatactgggcaaaatgcaattgtaaagaccggatctccataccggtgatacgagccacataggaccagtcgtgttgttccagttgtcgaattatatagtcatggcgcagatcgaccagacgcacgttcgtttgccctacctcgtcaagaaccctgcgcgctatccgggagattgcctggggttgcatttgcttatggtagcgatcagagcagatcacgcagttatttgtggaattcccggtgagaaatgtccattttctgtacacggaacgcaggtaatctgccagcatttgagtaatgggaatcgtccgagctggcaactggagttgatttcgttcaaaatccacctgatcccaagtcaggttcgtgatctcatcccgtagcagtcccgcctgccatgcaagacgcacagccacaccggcggcatcgctggcgtggcttcccagaagtcgttccatggccgccgtatccggccgattcacaaaaaattctcgcatacggcccctccgtgccccgaattccctgcctgatgcaaatcgaaacttgcttgggcgattattcgtcgacggacgggcttagagaaacttcactgaacagttcctgccgcttccctttgctcgctgcctcgtcacggaattatcattccgtcgctgattcatatgaaagggattggcgggtcaaagggaaaagacacaaaaaaagcccgtactatctgcacgggcgaaaaaaacgatattagaaccaaggccggacagaatttaacgtttccccggcttttttctgctgcccggagaggcaaaaccctcttgtgggcaggcgccctatgtgataaaatgtaattgcagatatgtaggataaattgttttttgcgattatttgtgtcggaatgataattccgtgattacgatatcagccccagccggtcaagcgttcgctggtgctctgcgccagaagtcagcagatagatgcgcgtcgtttcgatgctgctgtggcccaacaggtcggacagtttgacgatgtcccgacaggcccggtaaaacacggtggcaaacatgtgccgcagattgtgggggaacaccttgcccggcatcacgccggcgtatttgcaaaggctcttcatctccgcccagatctggcggcggcccagttcttttccgcttttggtgcgaaagatcgcaccagaggcggtcttttgcttttgggcatatttgagcagcttgcggcagagtttccccggcagcaggatcacgcggattttgcctttgagggagacttcggccttgccctgccgcacggcttccactgtgatatagcggacttcgctgacccggatgccggtggccccgatggtctccaccagcaagcccagccgctcccggcccagacggcaagccgcgtccagcaggctctgataatcggattttgtcagctcccggccggcatcccggaacagccgccgctggattttcaggaatttcacccggcagtcgtttagatcaaggtacgccaacaggctgtttaaggcagagagcatggcattgatactggcgggggcgtagccctgctccgccagataggctttccactctgcggtcagctccttgcagatttcgcgatcacccagccagcaggcgaatgcccggatatcccgaagatacttttccatggtggctgcgctcttctcctccagcagaaggtgacgggcaaacgcctgtatttgcaggggtgtcagtttgtgttcggacatagggggcctccttgcatgatttcatgccaacattgtacaggaacggcagagacagcaaagcccacagcggtaactgccgctgtgggcttgtgaatcctggtcccgcaatggtaggattgccaccggtttccagaaaatatacgggttgccctatctgcttatcatgggattcttctcttcacgagttatggaagcaaatatgataccatactgctccagaggccgatgggaatatccgaaacacaacgaggctgcgtgcagaaaaatatgcgtaagctgttgattacgagtagattttgcctttgttcacagcatcgaaatgccgatggccggcagagcgggttttccttacgcaattcttctgcccctccggccgcgcaaagtgggtccgggcttccgcatggaactgcccctggctatagccggggacgatgctttccctgccgaaaggtggggggcttttgggatcgtccgccccaaatcctgtaaaaattctttttattcccctgaaacgatggtactctgaaacacgaatatacctgtgaaaggcggtgaggcgatggagcgggaacagacatggatcagggctatccagcggcgaaactcccgggaggcggcggagcagctgatccagacctactatgacgaaatctaccgcttcgtctaccgtcagaccggcagcaaggaggacgccatggacctgacccagtccgtcttcatcgcagtcctgcgggcattgcccggctaccgggcggagcgggcgtccttccgcacctggctgtaccgcatcgccgccaacaaagtcatcgacacccgccggaaggcccggccggtctctattcctattcaggaaatggagctccctgcagcagaggactttgtggcccgcgtccatgaccgggccctgctggagaccatcgaaggctatgtctccggcctggaccccggggagcaggcggtgttccgcctgcggatctacggggaaaagaccttcccggagatcgctgccgccatgggagagccggaggcggcagtgaaatccagatactaccgcctgatcgggcggctgcgaaaggagtttggagcagatggataatcaaaaaatttccatgcccacagaggcggaaaaacagcgggccattgcccggattctggatgcaggcctgccccgccgggtcgcctttggccgggagctgcgggaggttttgcagcgcatcggcccccgcgcgctgctgtttggcgtgggggactgtttggccttgtccctgctgatctgggccctgtgcctgctgtcggcgctttttgtggccggttccaccggctctttggcaccggccctgttcctgttttctcccctgctctatgccgccctctccctgctgactgcctggaagaacctgcagaccggcatttgggagtggacctggaccttccaggtctccgcccggatggtggcggccctgcagatgctgtgcttcggcggggtgtccgtactggtgtgtgtcccggcaaatatgctgttgtggaccttcaccgggcaggagatgcccctgggctggatgctggcactgtctctggccagcctgtttctgtatggcgctctctccctgctgtgccagcggctgcggggacctgccgggtggctggcggcgccgaccggctgggttctgatgggcctgattcccctgatctggccccggacggcggagtggctgacggccatccccaccgtagtgttctgcctgctggccgcggccgggattactctgtaccttttggaactgcgctgcttctgccggcgcccgatggaaggaggcgtctcctatgctctccgttgagcacgtcacgaaaacctatgggaagttcaccgctttggaggacatttccctgaccttcactcccggcgtctacggtctgctggcacccaatggggcgggcaagaccaccctcatcaagatgctcaccaccctgctgttccccaccaagggacagatcctgtgggagggagaagacatccgggccttgggggcggaataccggggcctgctggggtatctcccccagcagttcgggtactatcccagctacacgccccggcaattcctccggtatgccgccgccctccagtgcatcccgaagcgggaggcggacggccgcattgaccacctgctggagacagtgggacttggggatgctgcggacaaaaaaatgaagaagttctccggcgggatgctccagcgggtgggcatcgccgtagccatgctgaacgacccgaagctgctgatcctggacgagcccaccgctgggctggacccccgggagcgggtgcggttccgcaatttgatccacacgctggctgaggatcggatcgtgattctctccacccacatcgtctcagacattgagaccatcgccgggcaaatcgtcatgttcaaggatcaccgcctctactgctgcgacagccctgcccgcatctgcgcccggttccagggcagggtattccagcttcctgccgggatgcccctggccccgggacagttcctgctcagcgaaggacagggggcggatggcccggtgctccgggtgctctgcgagacgccccctgtcaatggaacgccggtaacgccggggttggaggatgcgtttctcgccatctaccgggaggaacagacatgaatctggcggtctatgagtggcggaagctcttccgcctgcccgccctgtgggccttcctggccctgtgtctggcctttaacgggctgctgatcgccacgctctccccctatgaccgggcgttcttcaacgagacttcccaaacggcaaaggccttgggccagcgggttgatgaagactttcttgccgggctggacgctatacccgccacagagaaccgggatttgctgcgtcaatctgtcaccgggatggaggacattttcgagacgtatgacaccggggaactctcggatttctatgccggtgtggtggagaaatcccctctggcagttacctggatgacctggaaatatgatctgctggcgagccgggtggagcacctggcccagactgacgcggcgctggatttgtacgccggcccggccacctacggcagccaccagttcctcttcggcgcgctgttccgggccattctctgtgagagcgccattctggccatgctggggacgctgtatctgctgggctacgaggggatgcaccgcgcagagggcctggcctgcgcctcccgaacgggacggaaactacggcgggtgaaggtcctggcggctctccaggcgtcggcggcgctgtacggcctgctggcgttctgcaccctggtgccctacttcctgctgtacgactacagcggaatctggaatgccagcgtgtccagccagttcaactatttctcggacatgctggtggtccggcccttcctcacctggggggacttcacggtgggtcagtacctggccgctgccctagccctgggcgcggtgctgacggcggtattctccctgctggcgtcggtgtgcggcacgctggtgcgaagcccctatctggcggccctggcgctgtgcctggtgtgcttcggcggactgggactggtctccgttctgggggagctgggctggtgggcggcctatttgattgcctgtttccagccggtaacggtctggctctcctgcagcgcctggttcacggagctgggactgaacgccgtcctcccctggcaggagaccatcgcaagcgggctgaacctgctgcttttgggcggcggagtcctgttggctctcggttggtttgacagaaaggacgtgtcctgatggaacttttgaaatgggagctgcggaagatctggcggcccggcatcctggcggccatcctgctgctgggggcggtatactactggatgttcccacagttctatatcgagcacttttgcaacggtccccagtcggaggcccagttcgatctggcctccgactgggtggagcggtatggccccaccctggaaccggaagaacgggcagaactggacgagcagatggcaggggagatcacggcctttgacacacagatcaccgccatcccggaagctgcggcagcggggctgacggactataaatcttttctctcctttcgggggactacctgaacggcatacgcaacactgatggacaggcagatatggatgtggaggccctgctctaccgggtgtacggcggcaccaactggtaccggatcgaggcgctggcggatactctggagacctatgatacccaggaggatcaccgcgctctgattgtctccaaccggcagcaattggcccagccggaggctatggtccggcgggaggcggagctggcaagctcggatatgacccattccctgctgccgtcctctgtgaaatactccactcaggagtacggcaaggatctggcggtatggtgcgtactcagcatcgtgctcctgctctcccccaccctggtgcgggaccggctgcggaacacccggcctatgcagtgggcctcccggcgggggcggtccgttttgaacgttcagatgggagctgccctgctctctgcgctggtgctggcggtggtgaatataacagtctatgtcattccgttcctggcccaggggcccctgcaatttgccgcctgcggcctggacggcatctgggagtggggcactccctggttcgactggacctacggcacctatctgctggtgctggcggggctgattttggccctgtccctgggggccgccgggctgacggcttttctctcccagtacagcggcaactacatcgccatgctgctgaaggccgttcccctgttcgtggcggtggggtcgtgctgggctcctggcttctggatcggcccttcacgttccgccccctctgggacggctacggcccctgggtgcccaagggtgcggaggcggtggccgctgcagtcctgctggctttgggacttggcctgtgtgccctggcctgccggcggcagcgaaagagggaactatgataaaggaaattttattttctcttaaattttatctctacaagtatgatccggattgtgacccggaacgatgaaatagcgcggagtggagcgcagcagccttcgagtcttggcccgtttggggtctaaaaacacttcggcgccggccgtccaaagtaggcgtgggcctctcagcgcttggctgctgccggcaagccaaatgctccgcgcgtcctgcagggagcggaatttaatgacattgggccaaagctccctcccgcctcattggcttacaggaggccagtccattcctctgtgccgttgtccatatcataactgtgagcgttggtggcctctataagtaggcccaatgggtcccttccacatcggagaaccgccgcagttcatcagtatggcggtccatatacgctgtgtcggcgctgcggcccaacattcggttaacgatggcagttacctgtgcccgggtgatagaatatatggccggaacgtaccatcgaaaaatccgccgatccagccgtactgggcggcgctggtcacttgggtacaaaaccagtcatcctcgttcgcgtcggagaagaggctggttccaccgggcgtctcgttggcaaaccgtatggcgatcactgcgaattgggcctgggtgatatcccgattgggctgaaatgcgccgtcggagtagccctgtatgatgcccagggataacagcagaggcgcgccacatatcatctggaacatctgtgcaacgtatcggtgacagacacgttcttttccaatagtaggttgtagaacatctgcgccgcctggccccgggtcatctgccggccgggggcgaaagagccgcctgtgaatccgtcgagataaaccgtatggtctctggtattcaaccagctggacacgtcggtgttatcaggatcggcgatcggctgagtggccttaaataccaccttgatggtgtggttggcccgcacgttctcaaaggtatagtgactgatagcgcctacgctctcgccatctaccagcacattaaaaatccggtaaccgtcgccggccataatgtggaaggcccggtcgccgccccggctgacgttggcgcgcccggagggggtgatggagccgacttggcctgtctcggcggtgatggcgcgggatccgctggtcctattgggccgcttttttctgttctggcagctcatcccaaccgacggccagctgctccgtgtccagcagacggtcgtaagcctgttccgccagcagccgcacgccgcggtcgatctctgcctgggtgaccagatacagctttcgcaagcaccggggattgcacttctccggcgctacacgggccgcaccagacagactctggatgtcccccgtcacctgtgtccgccgcaggggccgcctgcttctggtgacgaacaccggccctgccgtcagcccctgccggcggcaataggatagcagctctgcctgcagacaccttggcaactggacacgccgctgctcaccgccggagacagccggtgtgcgtccactctgcacggcctccacagtgatctgaggcagttctccgacgtgggctcctgtcagggcaattgctttcaccaaaagatacgttctctccttttccagcgcccgagcagcagacagcagccgcagatattccgttcgggtcagttccgactggggtgccgtttccgtctccagctgtccggtcagctgcagatcccggcggcccaagtagtccagcaggccgttagcggcggagatgtttgtgttcactgtggccggggcatatccctctgccagcagagcctgccgccatgtctccagagtattcaagacgatttgcttgtcaggcggcagatagtcgtagaatgtcttcagttttgcggcgtaaaaccgcacggtctcttcccggcgccctcggtgattcagatcctccaaataggcccggatgctctcttcacttaccgttacaccgattgctttcagcggtgctgccgccttttgacacaccgcgcctgttctctgcattgctcctccccctatcaacgaaatcaacattttgaatacgtccgcgggcaaagtaagacctggagcgcatgatttcaggagagaatccgcttctaaaacacgctccagacctcgttggggcagagaaaagagggccgagaaaaatcctttttcccggcctgattttgtgcgtcccaattggggggagtcccttgcggttcctttcaaaccgtgctataataaaagcaatttatgtaagaaaaaaggggccgttgaaattttttgtgacaaaatgttgattttgacctacgaaaccagccccagacgttccagttgccgggcgtgctccgctccggaggtcacaaggtagatacgagtggtttcaatggaactgtggcccagcacatcggccagccgcacgatgtccttgcaggcccggtagaaaatggtggcgaacaagtgccgcagattgtgaggaaacaccttggcagattccactccggcggacttgcacagccgtttcagctctgtccaaatctggcggcggctcagagaggttccgtttctggtgagaaaaatctcgcctgaaacggttttgtgttttctggcgtatttcagcagtttgcggcaaagcttgcccggcagcagaatggtgcgaatttttcccttgagggagatctcggtccgaccccgctgggcggcctccacggtgatataccgcacctcggacacccggataccggtagcgcagatggcctccatcaacagggccagccgctcctgcccacgcgctcttgccgcggccagcaaccgctcgtactcctggcgggtcagttcacggcctgcgtcgcggaacaggcggcgctggactttcaaaaattttgcccggcactcgtcccagcccagaaaatgaaacagtccgttaagtgcagccagcatagaattaatggtcaccggggcgtagtctttagagagcaggtgatccctccattcggcagccagttccctggaaactggtctgccgtccagccagccggcaaaggccctgatatcccggagatacttttcaatggtgccggggctccgctcctccctccgcagatgtgccgtatatgatgcgagttgtgccgggtcgattgtccgctcaggcatttctataacctcctacaaatatttttctttattttatcttgcaggaggcagcttatgcagtactaagagccctccaaagtccgttcaaagtctggtttcatttttgttttctgtagtatacgtgaacttgtaacgggcggtccgttatgcgttttttgctgtgtgttttttgaagcagatggccggccgatgaacgtaaagatttcagatattgccgctccccataaaaggcccggctgatagagcaattgggattctggttgcctctctgatccggcagccaatcaacttgtaagggtttggatgggacggattgccctgtgtgcctgccgcatttctggtcagagtgtcagtgcgaccggaggctgctttgctctgcccgtataggaaaatatggcctatacagactgcggtttgctgtttgaagccagtatggcatccgctatgatgtccgccatagttttaagaatagaaattttgtggaggaagtgatctgcgtcacctgggcagagcggcaagacgccaaaaccggtatttagcaggatgttcgcccctcctttcgttgtgatcttgtgcttcccatagcctgccccggaatgataaaagccgccgtagagtggacacgacctccgggggtgggcgatttcggggctaaacacacttggaaagcacggtgtatcggatggagaattctgcctcagcttatcacctgaaaggcgttgtacaggtccgcctccgcaaccgcaaaactgtctgatttgcgatcaatcaagctggttttcccggcttttggcatcaaaaagctcggaccagatcgggaggcacttccgcctgtcccgaaccccaaactatacaggacaaaaaacgaggctcagaagcattttctgcatctgagcctcctgctgttttcggtttcagaaccatttgccgggactttttccatggctttttccgcctcttttggggccgatggtgtggcgtgggactaggtgtccaaggtcaatcccacactgaaatatcagagtggcgaatgcgcggcgtaggtcgtggaacctcgctttcaacagccgcccgcttcagaaccccgtggaacatgtgcgggacgctgtacagggagaccggtccgccggtgtgggaggggaatacccaagggctgctgccgcttttcccttcggcctttgaaaaacgcccaagcgggcggcagatggccaaatagacacgcctctgcaacggcggaacgatggtccaaaaccggtcccggaccgcctggagaggaactctgcccatcccgcaaggcgcatagcggccgaaaggcagtcacgtggggcattacccgcgggtgttctgcggctgtttggcggagtgcccgccaatttctgccggatcggacggatggtgaaccgcgggctgccgtcgcgtcgtctggcggccctggtcatcagctcagctatctccgtggtgcggagaccgcgctcctccggctgacgatgcggaacaccaagaagtccgattcgtacagcgcttcgcagctgccggacggtagcacggcaagtacgatcacagttgtgcattgaggaacagcgtcaggtcatcgcggcttttgcaactggtccctttgacgtggcttccctcctgtcggcctgtttcttctcacagattcagacgtttggggcggcgcctgtgaaccgcctcgtttatacagaatcaggtgcctttgacgattccgaacaatagaatccagagacacatgcaaagtgaacgcgccttgatttgatgttctcgccaggaaacggtcctctgtaaaagtttactcttccggacgctctctgctttccgttgaaaatacgcggcccttccataagaaattgcctttgggaatgctgaattgaaatcatctctgttctatgcctctgttccgttcagcttccaccgggcgctctcactctggagctccaccatgcggcggtagaggccgccgcgctccatcagctccgccggagttccctgctcggctacatggccgttttccagcaccacgatgtggtccgccccggccacggtacgcatccggtgggcgatgaccagcaccgtcttgccggccagcaggcgggagagggctccctgcaccttggtctcgttctccacatccaggctggcggtggcctcgtccagcaggacgatgggggcgtttttcaaaagcgcccgggcgatggagatgcgctgccgctccccgccggagagcttcgccccgttctccccgatgggggtgtcatagccctggggcaggcggcggatgaactccccgcagttggcggcctccgccgcggcccgcacctcttcgtcggtggcgccccgcttgcccaggcggatgttttccatcacggtatcgtcaaagagcaccacatcctggaacaccatggagtagtcggtcagcagcgcctccgggtccacggtggagatgtccacgccgcctacccggatggtgccctccgtaacatcccacagccgggcggccagccgggcgcaggtgctcttgccggagccggagggtcccaccagagcggtcacttcaccctcccgggcggtaaagttcacaccgtccaataccttcttcttgtcgtaggcgaagcccacatggtcgaacacaatgtcgtggcccttgggctggaaacgctccactccctcggcggtgggggtgttatagatttcgttcatgcggtcggcagacacctgggacacgaacagctctgcaatgagggccagactctggtcgaagggggcgtacacacgggtgatgaccagcaggaacaaaaacagcagcatgaagtcgatctgtccggagacgatcaggctggcccccgccaggatggtggtggcgacccccaggcgcatgatgacgctggccgcattgacaaagatgccggtgcccagctcgccctggatggtgaccttctcatggtcgtcgatcttctggttgagcccggccagatagcgcacctcctggttggtggcgcggatctcccggacgttttccaacgcctcctggatgccgtcggagacacggattgcggcctgtttcgtccgctccgaggcccgggcggagatcttccgggtgccgaacagcaggccgaaggccaccggcaccccccacaggcaggcgatagtcagccgccagtcatataccagcaggcaaaccgcgataatggccgtggagatgtaggcgccgtacaggtatcccagcacatgggaccagacgtgctccatgcggttcacatcgcccatgagggtctcggtcaggtccgccagatcccgcttgccgaagtagcccaagggcagcttgcgcagccgctccgccaggctgaggcgggtggacttcacctcgttgtagaccaggccgtaagtggcgtggtactgctgcaggtgggtcacaaaggacagaatgacgaacgcgattaccagcccaagaaagagcgccgggccgggcagcggcgctccgtccgtcagggttcccatcaggccgtacatcaacaggtacaggatgcccatgccgtccatgacgaccagattgacaatgaccgtccagaaagcgccctttttggcgtttttcacgccctggtcggtgagggcgtatttgcgctgaaagtttttgccgaacatcttcttcacccctctctcactgttcgctggtgatcttccactggaccgcctggttgtaatccgcccacatccgggcatagaggccgccggcggcggtcagctcctgatgggagccctgctccgcaatgcggccctcctccaacacgagaattttgtccgcgcccacgacggtggacaggcggtgggcgatcatgataacggtgcggccccgggtcagctcagagaacgccttttggatcaatgcttcgttctcggggtccgcgaaggcggtggcttcatccaggaccacgatgggcgcatcctttaagatggcccgggccagggcgatgcgctgctgctcgccgccggagaggtaggtcccctcggagccgatcagggtgtccatgccctggggcagcttctccagaatgtccccgcactgggcggccatcagcgccgcgcgcacctgctcttgggtggcgtctgggcgggcggcccggacattttcaaagatggaggctttgaacaggcggctgtgctggaacacaaaggcgatctggtccatgagcacatgggggtcgatctgccgcacatccacgccgcccaccttcaccgcgccggaggcggtgtcccagaaccgtgggatcaggctggcggcggtggtcttgccgccgccggagggccccaccagggccacagtctgccccggctccgccgtgaaggagacatgggagagggcgggggtttccgcgccgtcgtaggtgaagctcacatcctcaaattccacacggctgctctggggggacttgggctgctccggcactttcagctccggggcgcacatgacctggtcgatgcgggcaagcgcggtgctggccagcatcatgcccgatgcggcgaacatgatcttggcaagtgccgtggagatgatggcggagaacaccgcgtaaaaggcgaagtttgtgacaaatcctgtgaagtcgccggcggccagagccccgggcgccaggaacagggccgccggtaccagaaacacaaaggcgccctcagtgaaggtcaggttgatggattgaggtgtccggcaaatatctgcctggtagtgctcggccttggtgctgtagtcctcaatagcctcctggaacgccttgaaggagtagacggtctgctggaagatcttgactacagggataccccggacgtactcagtgcctgctttggtaatgcggtccagggccgcctgatactctgccagaatcttggcgtttttgccgcccatcatggagaacatggccacaatggagatcaccgcagccagcaggcaggccgcccccatccgccagtcaaagacgaacatcatcaccagcatggcgatgaacaacgtgatggtacccacgatgtccgccaggttgtgggccagcagggtctccgtgtcagccgccgccgcgtccagccgcccgcggatgaggccggaggcgttggagtcgaaaaagcccagcggggccttcatcacatgggccacaccctgcttgcggatattggacgccgtgcggaaggcagccagatgggtacacatcaatcccgcaaaatacaggatgatgccggccaccgcaaaggcgaacgccagccaaccgtattgggcgacgctctgcgccttcgtccagtccggcgccaccgcgatcaggtcccgggctgccagccagatgcagatgtagggtgccatgctcagcagcatggacaccgccgacagggccaggcccagaaaggtcaggcccttgtggctgcctgcgtagcccaacaggacggccacatcactctttttcttctgcttcataaaaaacctccctctcaaagttagctaaaactaactgtcatccaaaaagacagggggctatccccccatcaatttcagccatccggcggtgtagaagtcccggagctgatccacatcccgcatcgcctggtcccggggcatgtcgtgaaccacgatctcaaagatgccattgaacatcccgctggcgatgatatggcacagggatttgtccagcaccgggatgtcccggcccaggcggcggagtacctccatgtaccgttgggtgtattccacctctgcctccaccatgttgtggacgaagtgctcatagctggtgccctccgcccggcacaggagcagcttgaccggctcccggtgggcacagatgtaatccaccatccagtggacacagccagaagactccacgcccatgtgctccggctgctgctcctcaggcagctcggcgaaggaggtctgggccgccatgaacttccccatgagggcggcggcatggggctccacgatagaggcgaacagggcctccttgctggaaaaatagccgtagaaggcgccggtggtcaccccggcattcttcacgatctgccgcagggaggccccctggaagcctttatccaggaattccgccatagcggcctcctgaattttttccaatgtggtaacagatgtttcttccactggaatctctcctgtaacatcgttatataacggtgttataatacaaccagccccacaatttgtcaaggggggaaagccgaaaaagcccggcgcaagtgcgccgggcttttcgatcaaaatctttgccctgatttgggaaggggcagagcacgcatgctgtggaggctgacgcccagagtggacaggttgtggagcatggccgatgtggccggcggcagcacacccgccgcgccaaggccgatcagcgccccgttgaacccgatgacgaatcggtagttggcttggatgcggttcatgagggccatggccagctgtcgcagctgcaccagctcccacaggctgtcggcggcgatggtgatatcggcgatctctctggcgatggccgccccgtcgctgatggcgatgcctgcatccgcttcggagagggcaggggaatcgttgatgccgtctcccaccatgaggactgtgtgcccctcccgccgcagggctgccacatactccgccttgtccgccggaagcaccccggcccggaagtcatctacccccagctgggccgcaatggcggcggcggtgcgggggctgtccccggtgagcatgacagtctttttcacgcccagtctccgcagagcggagaacacatcttttgcctcctcccgcagggggtcggagatacagatcacggcggagagcactccgtcgattgccaggtagagctgggagaactccggaggcagggtgtcgaacttttcctgctcgccttccggaatgcgcaccttctcgtcctcgaagataaaatgggcactgccgatgcgcacttgttccccatccaccgagctggcgatgccgtgcgccaccagatactccaccttggcatggcgttcctcatggcgcaggcctcggcggcgggccgcttccactacggcgttggccatggagtgggggaagtgttcctccaggcaggcggccaggcggagcatctccgcctcattcttgccgttgaaggggatgatctgggccacctggggacaggcgtgggtaagggtgccggtcttatcaaagatgatggtgtccgctttggctgtggcttccagaaacctgccgcccttgacggtgatgtgctcacgcccggcctcccgcatggcagacatgactgccaaaggcatcgccagctttaaggcacaggagaagtccaccatgagcaccgacagggctcgggtcacattccgggtgaggagcaaatccagcaggctcccggcgaaggtatagggcaccagcttgtcggccaggttggacgccttggcttcagcggcagacttcatctgctccgaccgctggatcatgtccacaatctggtcgtaccggccctggccggatgcttgcttcacctccagggcgcactcgccctcctccaccacggtgccggcgtacagcgcccctccgggacgcttggccacagggacggactcgcctgtgagggaggcttgattgacggtgatctcaccctccgccaccacgccgtccagagggatgacgcccccggcccggaccacaaccagatcgccgggcttcacttgtccaatggagaccagtacctcgtcgttcccgtttttcagccacacccggtctacgtgaagggacaaactctccgccaggtcggccacagacttcttccttgtccagtcttccagcagctccccgatctccagcaggaacatgacggtgccggcggtgccaaagtcccggcggcaggccgaaatcccgatggacagggcatccagcagctccaccttgatctgacgccgtcccagacagcgaaggcccttgcgcaggaaaggcgccatgtgccaaatcacccgggcaatccgcagcggcgcaggcaggaacagggtggccgccgcctttactgccaccttacccaccagtttctcctggaactcccggttcatagcccgggtgctgtgatcggggagggcgacagacgcttctgccccggcccaggtgaacgcgccgagtgcggagagaaccgtttcccgctcccctgtaaaggtcacgatgatacagcctgtgcgctcatggacagcggcttcccggacccagggctggcccttcagccaggtctccagcaggtcggcctgacgcaaggtcaggtttttctgccggaggcgcagacgtagccgcccccggctctcgtgtacgatggttgctcgcatacaggtactccttcctatgaaaaagggagccgctttccggctcccttccgcagcttttaagcctcctgaccctccacctgggtttcggcctccttggaggcccgggcctcattgatgtctttggcggaggccacaatgtcggcggcgttctcttggacggcggtgaccgtctccatcacgctgtccttcatccgcaggccggcggcggtgatgtggatgtaggcattcttggcatccttgctggtcagcagcttcacgccggcagagccgaacagagcaccgcccacaaagcaggccagtctgacgtaatgcttcatcataggattcttcctttccgtgattggttatttgcgtttgtaacctgtgatcatcaccatgatcatgcagatcacggcgccccaggcccagaagcgatgttgtttcatcaagatctcctcctgtctggaaacaagcccgtctcttcgcgtattaaagtattatagcagatgaaacgcccggtgtatcaccaaaacagacgatgttgtgccggttcagacatccttccggtacttggccggcgtcataccgtactgccggcggaaggcggcggtgaactggctggcactgccatatccgactgactgagccacccccagaacactgagggaggagtcccgcagcagctctgccgcccgttccatccgccgctgccgcagccaggcgtggaccggcaggccgtacagacggcggaaagcatccttgaatgttgtggcggagagcatggccatgcggctcagggctgggatggtcaggggatcggccaggtgatcctccatataacggcgcgtctttcctaaaacccggactacctcccgatccagtgccggggccgggaggacattcggcgcatttccctctggggcggagagcagatagagcagctctgccgatttccacacgcaccagcgggcctgctcgctctggggcaggcagtccaggttggcaaagaccgcccggctccaggtgctgggcccctctacggcacagccgttccggctggccatccatcgccgtacctgctctgtgtccagagagaggccccccagcagcgcacacagggcctccaggctgtcccgggcgctgcgggcgtccactgctaccaggactccctccaaggaggtgccgaccttggcggcggacaggctggaggcgtccgtgagaagaagcacctgccgggcacctgccgtcagggccgatccgtcccgccgggtcagtgttaccgtcccggcaacacagaacaaggcctcgaaatgcagaggctccagtcgaaggggcagggggagagggctcttttccagagagaacaggcaggcccggacgccgggcatcacctgcgaccagtctccacggtccgccagaacctctgccagcatccgtctgcctcctctctctgctgatctgtgtcccggccgcttaccggccgaacagccccttcttcccccagggctctttccgaatctcccctgcgtcatagccggtggcccggatggcttcccgcagggctgcctcatccaactctgtttctgcgatcaccgtggtctcctttttgctccgggacgaggtgactttcttcaccggaaaggctctgcgcaccgcgtcgttcacatggctctcacacatgccgcacatcatacctgtcacccgcacagtatatttccacatattctgccgcctccactgctgcttctattagttaacgctaaccacaggacaatcttctcctgtcaggggaattgtccagataatatcagtctggtttcccatgcaaatcggttaggcatatctaaccaaaaacattatagagccgcatcttctggtttgtcaagccccgggaccgcgcaagcattggcacccggcatggtattccggcaggggcctcttaaaaccggctacgaccgtctggcaaacggtacgcaaagtggctgctttgagagaggggcgaccatacaaaagcatttgaacggcgtggcgctcgaaagaggggaaattacggatgtgcctgccttttatcggcgtgttgattccgtttgcaggaaccgctttccggcctgcaccttactttggccggtgtcggagcaacggctccccgcctccgccaaaagagccggcaggtgaaagggccccacacccatctacgatgctccgccacgatggcgctggatgcatggtgccgggctaacaaggaacatgcccggaacgaaggactttcctgctctcgacggccctgcagattctgagccgtgtttcagcctgcggcccgatctccagttctgcagacgacggcagaatctcctggtcctgccgggctgacgtctcttccagctctgataaattcgtcctcgactatctgtctcttgcagtttggcctctttaccatggctgaaaatagcgattgcagtcctcttgggcctgcttcagcgcttcttctggggaacatacccccaaaactgcctgctggacatgggccgccagaatggtctctagttgcagctcgctgaagttctggtagtaagtgctgttgctgcggcgctgcgctgtgggaaagctctttcgcgcagtggagagccaggggtattgctcgctgatatcgcggttgctgtatgcggaacggcagggagacaggccgcccagcatcgtgaagaccggtgccaccaagtctgcatacagccactccaaaaacttgcaggcagccgcagggcaggtgcagctctgggcgatcccgatcacgccgccgcccaaaagcggctttccgccagggacgggggcaaagcccagcttaccagcaattcgggacatctgagagttcagaatgtgggaggcatagttgataaacaccacagtcatggcggccgttccatcggcaaagccctccagagcattcttccagaaatcatagatcgtccggtccgaataagaatatgtctcccggtagttttccaacgcacgcagcgcctccggcgtatccagggtgatccggccctgactatccaggagacgtccgttctccgcaaaaaggcggggcatgaattcgctggggcttacgacaacattgccgatggctaccgttgaaccgtactgtgtgggggaggcggcattgcagcctctggtaaagaaagacgcgacgcggttatagtcgcggaaggtcttggggacagcaagctcttcccggaagtcctcataatacatccgcttatatgtggggtcggtgaacagatcccgccggtaaaacagcagttggatgctgggatcatagggaacacagcagcggttgccgtgggcggtggtaaaatgctgccccagctccggaatggctttagccagcagcccgtcccaatcaaaggggatctgggcaaggggacggtatacctcctctccaagctcatccagccaggctacatccatgcggatcaaatcatactggctgcgggcgggagactggaccacccggtagacatcccgcagagagggcaggaccgtcagctccaggtggatgccggcggttttctcgagatgcggcgccagcctggccaaagcggtggtcgagggggaggccatggtcagtattcgtaaagtttgagaatgcagatggcccggcaccatctgcgcagtgcggaatccgtcattttccatacggagctttccgggcagggcttttccctgctccaggcgggccagcagctgtttcacaatccggtgggcaagttgcttgtagtccagttcataaactgaggtctccggatccgtcacagcggcctttgtggccagcgtaacaaaacgaggcagcggcgcctgactggagtaggcgcaggctgcccggacggcatcctctctgcggcgatccgagcatatcatataatcatacgcctggccgccgtcaaaaaacgcaaaggcccgcaggccgatctgataattgcggcagtccagaaagttgacggcttccttattctggcagtgcgtacggacacccctgataaacagagcagcatccggcagctccgcggcctctgtaaagacgccgattcgggcagcaccttgagagcagacatagtccgcaatctcccggccagcccgctcaggatcaaaacctgcgtacatcacatccggctgttccggaccttcccgctgcaaaaaaaccagcggcaggtccggagcttcggcccggtagtgggacaatgcatccgtcaggcaggtactggtaatgatcgcgctgaaacgggcgttcaatgcttccgtcagcagggacagttctctgctctccatagaacgggtggaatagagctgtacagaatatcctctctgtgaaaactcgctttgaaagacctcatacatagccgcccagtgggtgtactcgatccccggaagcataaccgcgattgcccggtcctttcccagccgcagactttgggccttggcattgaccttatagcccagcttttccgccgcctgccagaccaaacgaatcttttctacactgacatttccgcggccgttgatgacattggatacggttccgtgggagacaccggcctcccttgcaatatctttgatagtaggcatcccggcgcctccttccgctgatctgtttttattgtactatgtgagtttgttcctggcaagagcacttctcgccaaaacgaaatagtaaaattgaacagaataaggacttatattctatatgttttgtaagaaacgtgtaaatagtactgaaaaaatccaaaaaagaaattgacacgttccaattttggtggtacggtaacaatagaaactcgcaattctcagcttcgatttttcaattttggatgaaaaggagatgtcattgatgaagaagtttctcagcctagcactttctgttttgatgcttctgtcgctgctggccgggtgcggcggtggttcctccacagacgacggcgcccagcagaacggaggcagcgagacggcggagaccggtggaaaactggtcgtgtactccgcgctgaacgaggacaacaccattgcgatggcggagcagtttgaaaaggacaccggcattgaggtcgagtacatctccctgggcggcggcgacgctgtggcccgcgtccaggcggaaatgagcaacccacaggcggatttcctggtgggcggctccgtggacctgtacggctccctggcggaggctggggcgctgctggaatacgactcccccaacaacgatgacctggatgcgcgcttcaatgaccccaatcatctctggcagggctggtacatgggcgttttgagcatcatcatcaacgaggagcgattccaggaggaactggcctctcagggcctggcggagcccgccacctgggacgatctgctggatccggcctatgacgatgtatttgtctgggccaatcccactactgcgggcggtgcctacatcgccaccgcctgccagattttccgcctgggtgaagacgccgcctgggattacctgaaggcgctggaccagaacgtccaccactattatcagggtgccggggacgtcatcagccccgtggcaaccggcgagttcatcgcctccatcgcctgggcccacgacagcttcaagacccagcaggagggctaccccctcaagctcatcattccggagcagaccgcctatgagattggcggcgcggccatcatcaacggcggccccaacacagagaatgccaagatcttcatggactggctgctgaccaaggaggcccaggagctgaacgtggagtcctcctaccgctatcccgtccgcacagacgtggctgcacccgagggcctgccggcgctggaggatgtggatctggtggactacgaccgggaccaggccaccgcgatgcgggagtccgtcctggaaaagtttgaggcggaaatcatggcaaaccgcacctaaccggtagcaggaaagtgcctgcctgcaagagcaggcaggcacttttgcaatttacaattacggagctggaaggaggagtccctatggtcgcgggcacgtccgcacgggaatccgtcaaagaaatgaagcggttgaaaaatgaaccgctcctgctgctggtcatcatcgccattatcctgtttgtgggaatatttgtgatctatccagtggtcaaggtcatcctgttccccgatggggggacctatctggagctgttcaaccggccccgctggctcaccgccatcaaaaacagcctgttcatgaccctggtctccaccatctcctgcacggcggtggcatttctgttcgcctatgtcatcgcccgcctggatgtgccctgcaaagggctgttccgatttattacactgcttcccattgtctctccgccctttatcgtggcgctgagctatatcctgctcttcggcgtccaggggatcatcacaaaaggcctgctgggactccatgtggatatctatggccgcctgggactgtggatcgtccagactgtcaccttcttcccctacgcctactcggtgatctacggcgtgatgaagggcatctccaccaatctggagtatgcagcctacaacatgggcgccacccggtggcaggtgttccgggatgtgttctggcccctgtgccgccccggcgtggccggcggcgccctcatcgcggccatcaacgtcctgacggatttcggcaaccccatcatgatcggcggcgatctggccctgctgcccacggaggcgtatatgcagatcaacggctggtacgacatgagtacagcttccgtcctggcggtggcactgctgatcccggccgtggcgctgttcctggtgaaccgcttctgggtgggcaggcggtcctatgttaccattaccggcaaggagatttcgctaaatccctttccggtccccaagtgggtgaagtggaccctgttcacgctgaccatgctgatctccctgttcgtccttctggtgtacggcacccttttctacggggccttcaccaagacctggggatatgactggtccttcacctgggagaacctgcagtacgtgttcctgaaaggggaacagatctggaactccatcaaatacggcctcctggcgtctttaggcgccgcgctgctggccatggtcctggcctacatcgtacagaagaagcaggtaggcctcaacaagtttctggacttcctggccatcctgcccggtgccattcccggtatgtttctgggcatcggatttgtgctggcgttcaacggcggctggctgtccctgacggggacgggcgccatcatggtgctggcgctgctgttctggaatctgcccacctgttacagtgcggcaacagcaggcctgcagcagatcggcgcctcggtggaggacgcggccctgaatctgggagccaacagcttccgctctttcaaggatgtcatcattccgctgctgaaggcgccgtttctctcgggcttcgtgctgtccttcctgcggtcggttacctgcctcagcgtggtgatcttcctctacgcgccctccaccaccgtgggcaccatctctgtgatggtcctcgtgcagagcggacagtggggcgaggcggcggcgtttactgtggtgctcatcaccatcgcgtttaccgtgctgcggctggctcagtggctcctgggccgccagggcatcaagctggaactgtaaagggaggcggaacgtatggatgcttatattgaatttcggaacgtcgtcaagaagttcgacgactttgtggctctggaccatgtgtccttacagatcccaaagggggcgttcgtgacgctgctgggcccctccggctgcggcaagaccaccctgatgcgccagctggcggggttttccgagccggaggagggcgacgtcctggtggacggcaagcggatgaacgggttgccgcccttcaagcgcaatacgccgctggtgttccaggagtatgcgctgtttccccacatgacggtgtatgagaacatctcctacggcctgaagctgaaaaaggcgcccaaggaggaaaaggaccgcaaggtggcggagatgctggagatgttcaacctccagggactggatgggcggttcccgaagcagctctccggcggccagcagcagcgggtggcctttgcccgggcgctggtgatggggcaggagatcctgctgctggatgagcccctcagcaacctggacgccaaactccgggtggaggtgcggacggagctgcggcagatccagcagaagttcgggatcaccaccatgtacgtcacccacgatcaggacgaagccttgtccatgtcagacatcatcgccgtgatgcgcaggggccgcatcgagcagatcggcagcccctgggaaatctacttccgccccgccacccgctttgtggcggacttcgtcggcacggtgaacttcctggagggtacggcccatcgggaggcagacggcagcctgtccgtggaccacaggggtatgcgcctccgggtggacgaggacacggaccttcagggcggcgagccggtgactctggtggtccgcccggagggtatcagcctgatggggctggaagagactgtcccggagggcacggcgctgcgcggcaccattgaaaattacagcttcctgggtcgtatgatccgctactgggtgcgggtaggggaggaggtctttgtcattgatgacgccaatgtggacctcaccggcgcccggacaggggatgtgcagcttcgtttggatactcgcaagctccacgtgctgaaaggcggtggtgcggatgctgctggttgactttatcaatgtgggctatggcgacgcgatcctgctgcgggagacggagacacccttcgccatgctggtggactgcggggacgctcgcatcgggcgctcccgaccggacggacggcggatcactgcggcggactacctgcgccgggaggggatccgggagctggacctgctggtgctgacccacctccacctggaccacgccggcggactgactcatttgctgccgggggtccgggtgcgggaattctggaccaactacctcccgccggaggagatgtgggggcacacactcccggcagtgccgggagctccagccggcgcccggtgtctgatgacctctatggggatttatgtaaaagccctggctcatctgcgaagccagaagacggagatccggctgatccggacgccctgtgattgccggcggctgacggagacattgtctgccggtgtttttctggaggatgaagaactccggctgcggcaggcttccatctgggacgccgtcctttctggcgcgggcagcagcggggacctggaggcgcttgacggctttatcaacaacaccagtatccgcctgcggctatcctatgccgggcaggagattgagctgccgggggatgtgtatgcctcctgctgggagcggcaccagctcccgccctgcaccctcataaagctgccccaccatgggcacggggacgccttgacatcccgacttctggagatgctgcggccacggtacgccgttatctcggtctcggatgatcggacagatgactgccccagcaaaaaaattattcagcttttgtcgcagtttggcgttgaatgcttttttacggatgcagtaccgtgtcagtatgctccggatcagcctcatgttgccatacgttttcggattgaaaagggagttcttatggtatcggacgtgtaaaaagatgtggggggagggaaccgctctgaacactggaccccaacgatttatcaggatgtgaacgactcctgcctgacgcacgccgatattcccgccaggttggattacaatggggactggcgcggagacaacaagtgagagaatctcaaaaattattcccggattccttctgcatattgttctatatgagagactttgttccactattttatggaatacgacgtttattacccgcggggcataccgagggcatcttgacagcatttcccgtatccaaagcggttgtaacctggacggatcagcccatctccactgatggggtacaggtttccgccatcatcgcgtgtcaatgcatgagccggaagcggcttacgtgcagactgcagggcattcgggcagaaatgcgattgcggcttcgagaaaagggcaggcgcttcggcgcctgtcactttcctaaaattaggaatgcgcacaaaaaatcaggatatgtacgtggaaggagtgccgttctgcccgtcgtggcgggatagaatgctgcttccggcctgacgcctgctgtcatacgctttctgcttttttgcgtcacagttggccgacgcgatgccgcccggaggagactctgtgttctcgtaccgcgacgttttttgccttttacggggccatgtaaaacaagctcaaattggtctggcagacccaacctggctttatagctgtttgaaacagcatcggctcatagatggaaatctcgggcttatctctgccgcaccttgagcagtgggcattgcccctttttctctgccttttcaaagtggacacaggctaccgcctggtattgcattccgcttctctcccggctgatttccaaagaaatcagccgggtttcctgcgccttcaaagaattagatggtatctggaagaatttttgcgtggttttgccgtattctgagctgctgtgataagcatttgttggcttcatagccgagacgatgatctggtgaatgctttgcgctgtcttagggctcaagcccttgaatggtctcttgctccggttccagtccacccggcccttttccgtgtcgcttataccttttacagcaacataacagatggcaccgcggtgtcattctcaaactgctggttttaaatacgacagaaaaaatattacgttaaaaaatatggcggctgaggagcgggtttatcactccacagcctgcataagcatataagcattacttatgcgctatacgtactgtttccaatggagagacggaggggggcggcgcgcttccccggcttcatccagctaaaaataatttgattcaaaataatattatgtcttattttttgcttgttttctgcgaagtcatgaagtatgataggggtgtaagagaccggcgtcctccaaaacggtatataccgtttttatttccgctttgcggaaataaggagctttgttttccggcgaaaataacagaagaaggagcgagaaagatgaaaacaggtaagaaactgctggctctgctgttggcggtcgtcatgacgatgagtctgctgaccgtgggggcgtttgcggaggagaccccttcgtccgagacgcctttggagcagcaggattccggcagcgggaacatcccggacgatccggcagagggacctgcggatgacctgacaggcaattctgaggatggggccgcaggcgagtccgacgcagccctgacggcggcagacacttcgtatgtggcagaggtcgacggtcagcagtatgaaacactgcaggctgctgttgacgctgtgcagggcagcggcacgattgaattgacgagcagtattgcattgtcagatcaggtgaccattgacagcggaaagacgatcattttagacatgaatggtgagacgttgtctattggcttttcggacagcagtaaaaatttgatcgtaaacaatggcacacttacaattacaggcgacggtacctttgatgcaactgaggcgacaagctacaagggcttcatcaataactatggcacgttgactgtggaaaacggaacatttcagatagctgataaagccatgaccgttcatctgagaaatcaggatggcggtaaggctgtgattaatggcggaacttttagcggtggggcaacgattgttcgcagctttgaaggctccaatacgacaattaccggcggaagctttacaaatagtgtttatcccgctgttgatgtaaacggagaaacgctgattaccggcggaatttttacgaatacgtcttgcagcaggtgcgatagccaaaattggggatatacggtccgcagcggcgtggacaacgatcctgatgccaagctgacgattacgccgtcgtctgagggaagcgttgttgtgaccggcacgcagggagcccttagtgcgaccgctgggacaatggaagtcaatggcggcagctataagacggtagattgcgcccagaagcatggcgctgtattctatgcgctttatgtggccggagaagccggtgccgtacaggttgttgtaaatgacggtacatttgtgacggaggggaagcagactgccgttctggttggaaacagcaacgacgggggcctgaaagaacaggcgggtctccaaatcagaggcggtcaattcagcgcacctgaaggaattccggcctacaaggtagatgtagccttgggcggattgaacatcactggcggcacattctccagcaaagtcgatgaacagtatctggccgagggctatgtgcagaacgccaacggcgaggtcggctcccgggaagagatgatggttgccgaggtcacaaccgcagagggggtggaacagtatacctccctggcagaggctgtggaagcggctgcggacaagtctgtcattacgctgctcaaagatacagagggcgacggaattgtgatcgatacatccaaaaagaacctgacgatcgacttcaatacccactcctatacggtcagcggaagcacggtggggtcttccggtacagaaaccaacgcgtttcagttcttgacgggtggttccctgacgctgaaaaacgggtccatcatctttgccaatcagaagaccctgctgatcggcctgcagaactattgcaacctgacgcttgagaatatggtgattgatgccagtcaggcaagcgcaccctgtcagtatgcgatttccaataactgcggtactgttcagtttatcggaaatacgagtataaaggcatataaaaaccaaacggcttttgattcctgcaagtttggcagttacgagattcccacggtgaagatcaataccacaggcaccattaccggcgatattgaattgagcggcggcaagctggagatttctgccggcacgtttgagggaaatattcgtacggtcagcggttacgcaaagggtgatgcaatcatcaccggcggcacgttctccagcgatgtgagcaagtatctggccgagggtcttggacaggatgccaacggtactgtgggcaaggtcgaagagggatttgctgccgtcagaatcggcgatacctattatcagacgctggccaaggccatcaccgaagcaaaagaaaatgataccatcacgttgctgagagaggtggatcttggcagcgacagagttacgatcaacaaagcggtcactctggatctgaatggctgcacgcttacaagttctaacgcgaccaatacgctgtggctggaagccagccgtgtgaccgttcaggacagcaaggggaacggcaagatccagaatactggctccggcagcaacaatattgcagttgttgtcaatggtcagggcactgaggcgtatttcaaaagcggtacggtttccggcaactatgccgtctttattcagaacggagcaaaggccgtaattgacggcggcaaatacacaggcacctatggtatcaacacagttggtacaagtgatgaggcaaacaaaaccgctgtggagatcaacggcggggagatacaggcggtcgcatttgcggttgccggaaatggctctgccgactatacggagacagtgattaccggcggcagactggaatccactgagggaaatgtcatctatcatccccaggtaggcgacctgacgatcaagggtgatgcagaactgatcggcccgaacggcgtgcagtattgcggcgccggtacgctgaccattgctgaaaatgctgtgattaccgcaacgctgccctttacggaatttcccaccaagcccgcttcccagggggatggcagcaccgatgatggcgcggccctgtctgttgtttcccgcggcggcggttatcagggcgaggggcagaccatgaccgtgaatatcaccggcggtacgctgaccagccgcaacaatgcggcgattgccgtataccgtttggaacgtgtaaacggccagtggacaacaaatgagaataccaagattgtcagctaccttgcggcgctgacagtcagcggaggcaacttctctgccggcagcaaaaaggacgcttttgagattgatacccaggctgccgacaaaatcagtgttaccggcggctacttcacctctgatcccagcgattacgtaccggaaaatgcggaacccaagctctttgtggtcgcttccgacaagacgggctacgcctacatggtgaccaccacgaagcctacggaggtcgatcccattgtcacggagaagacggagactgaagtaagcgagagtatcgagctggaagaccagaaaaagatcgaagcggtcatcgacaatgcgcaggtcagcggcgtttctgacgcggtgacggagtccgcgcagaatgccattatcaatcaggtggagggagaactgaagcccgaggacaaagtggtggtggagatcaccgtgagtctgaccgccgataaagcggatttgaccacagcggacaagatgtatgtctcctataaggcagagcctgtggcgaaggtcatagtcaacgacgaaagcgtagggaaagagattcccgtaaccaacgactatctggacggccagaccctcattgaggtccgcctgccgattccggcggacttggagccccaggagatcatgcacattgcggatgacggcacccgtgagcgatatctgaatggttccggcttcactgtggaggatggctgcgcggtgctgcatgttaagcatttcagcacctttgtgctcaacggccagctgacagttgccgccaagatcggtgagagcgagtacggcacgctgcaggaggctgtgaacgccgcgaagtccggcgataccatcgttttgacgcaggattgtgacgagaagatctctgtctccggtaagagcgtgaccattgacctcgatggacacacttatgataaggacaagatcacgctgggcagccgctgcagcatgagcgtgagcgatggtaagatcacgattacttattccgctccctccggcggcggatcctcttcctccagcagcggtgattataccgtcagcgtggagaacagcaagcacggcaccgtcaccgtcagtcccaagcgggcggacaagggcgataccgtgaccatcaccgtcaagcccgacaatggctatgagctggacgagttgactgtcaccgacaaggacggggacactgtgaagctccagagcaagggcggcaacaagtacacgtttaccatgcccggcagcaaggtcactgtggaggccacattcactctggagaaagaggagaacctgccctttgccgacgtggcggaggactattgggccgtggaggagatcacctgggcctatgaaaacggctatatgaacggtgtcagcgccgagcggttcgcccccggcagcacggtgacccgccagcagctgtggatggttttggcccgtctgacggagttcaatccctccaacatgaccgaggcgcagcactgggccgtggagagcaagatttccgacggcagcaaccccggcggcgccctgacccgccagcagatggtgaccatcttgtaccgctgggcgcagcagatgggctatgacgtgtccgggcgggccgatctgtccgcgttcccggacaacgcctccgtggccgcttacgccacggaacccatgacctgggctatcgcagagggatcatctccggcaccactgagggcctgctgaaccctgccggcacggccactcgcgcccagtttgcggtgattttgtaccggttctttgaaaatgtgatgtaagtaccatgctttgcttcagggcggtccttcggggccgccctgtttttctgtccgatggcgggatgcaaagccgtcaagatacgagatgaatggatatatctcctgcatgtgccgcaatgtctatgaaactccctgggacgcactgtgcgtcccggggagtttcgggcatagaggggcgtcccatgaagtcgctggccgtacggcaggacacggcagcgaggggccagacaaggagcaaagagggatccattcaaccgttaggccggcggcggttcctgaaatagagccggagggcggcaggcagacgcgatccgcttctctgcatgtcagctttgacggcccaaggcaggaggctggacctcgtccggaactgccgctgacatgcagatggaggggatgtgttccttcccgagggggacctgctccttgatggaagagaatccttccagcacagctttaacttcgattttacaaacagggggtggagcgacccccgcctctccctttatactggtatcaaccgacgggccggccttgttggagaaaaatatttcgcctcttctacaagcggccgattcccgctgaggggggcttttcatgagaacaggcaccgccttgtaagtttgctacgggataggagagatcagatcatgcggcaggatattcgggttttggaccgggtgcgcggcgcctacgcctccctgcggccatcggagcagcgggtggcggactatgtgctgaaggacccggagacctgtacccggtgcaccatttcagagctggcagaccaggtgcaggtgagccagcccacagtgatccgtttcgtgcaggcccttggatttgacggctaccgcaacttcaaatactgcctcatccgggaccgcagcggcggcgcggcccgggaggcctgcttcgaccacttgggaggcttcgacttgaagccctgggaccagctggaggacctccccctgaaagaggttcgggtgtccggcggcctgctggaggaggcactgaagtccctgtccgtccaggagctggaccgggccgtgcggatgcttgccactgcccggaccatcgacatctacggggtggagaactcctgcacgccggccagtgatctcctgaccaagctgacctatctggggctctgctgccggatgcacaccgacgcctatctccagcagatcgccgccgcccatctgggggtggcggacgtggcggtagccttttcccactccggctgctccatggatacggtgaaggcgctgagactggccagaagggcgggggcaaacaccatcgccgtcaccagtcggaagaatcctctcttggccaagtacgccgacgtgtgcctgtataccgggggagaggacactgtgatctacggcacagccatcttctcccgcattcccgatctggcggtggtggatctgctgtacatggggatcattcagagcgactatgagcggttctcccgcagtctggacaaaagcggagcggtcattgccgaccgaggctatccggaggcgtgagattccccggcgggggctttctttgtaatttttctacaaggaaggccccctgtttttgatgcctttttacgtttctctaacggaaaattaaaccttttacgcttgttttgcggagctggaatttgctaggattacaccgtcgccggacgtgcggcggcgcccacaagaacttttgaaaccgagaaaggagcggtttttcatgctggaactggagcatatccagaaggcatttgacggcgtgcctgtactcaaggacctctctctccaggtggaggacggagagatcgtctccatcctggggccctctggctgcggcaagaccaccctgctcaatatcatcttgggcatcgtggatgccgaccagggagagatccgatacagcggggaggatctgacccgcacccccatggagaagcggggcttcaacatcgtctttcaggactacgccctctttcccaatttaaacgtacagcagaacatcacctacggcctgcggaacaagcccggcatctcctcccgggaggaggtggatgagctcatcgacctgctgggcctgcgggagcacctgggcaagcgcatcgaccagctctccggcggccagaagcagcgggtggccctggcccgcaccctggtgatgaaaccccggattctcctgctggacgagcccctgtccgccctggacggagtcatcaaggaatccatcaaggaccggatcaagaccatcgcccgggagtaccacctgaccaccatcatcgtcacccatgacccggaggaggccctcaccctgtccgaccgggtgctcatcatcgatcaggggtccatctcccagtacgccaggccggacgagatcgtccaccagcccaggaacgactttgtgcgcaagttcatcctccgccagctggagatcaagcgcggcaatatctacgccctgttcggcgaccgcccgcagctggccggcgaggctgtttgaggaaaggcgccatgagacggaaaaattgggagctgaaggggattttctggatcatcacccttctgttcgtgggcttcctggccgcccccatcctcctgctgctgggcaagtccctggtgggggagggcggatttacctgggagttctatgcctcggtggtgacccgggagggatttctcacggcccttggcaacagctttgcggtggcggccgcatcggccgtgacggccacggtcatcgccttcctgatggcctatgcggtccactacaccggattgcccaggtgggccaagcggctcatcaccgccatcgcgaccctgcccatgttcctgcccaccatcacctatggctttgccatcatctactccttcggcaaacaggggctgctcacccgcctgctggggcggcagttctttgacatctacggcttcggcgggctgctggtgggctatgtgatctataccattccggtggccttcctgctgatccacaacaccatgggttttgtggacaaaaagaccatcattgtctccaaggccatgggggaccgggacctggccaccttctggatcgccattcttcgccccctgctgggaactctggcgggcgccttcattcaggccttcttcctgtgcttcaccgacttcggcatccccgcctcagtgggcggcggctatgaggtcatcgccaccctcctctacaaccagatgctgggcggcatccccgacttcaaccggggggcggtcatcgccatgatcctgctcatcccctccatcggcagcatctgcatcctgcagctgctggagcggttcaatatccgctatacccgcatctcccaggcggacctgcggaagaaccccctgcgggatacggggtggggcgtctccagcacggcgatctcagtggccatcctgtctatcttcgcggtgatctttgtggtccccctggtggaggagtggccctatcagaccagcttctccctggagcacttcgccgccgtattcaccgacagcgagctgattaccgtctactggcactctctggtgatggccctgctcactgccttcctgggcactctggcggcctacggcgccgccctcatcaccgcccggagcaccttgcccccgcggtacaagcgggtcatcgagagcattgccctggtgaccaacgccatccccggcatggtgctgggtgtggcctatctgtttctcttctccggcagcggcctgcagaataccctgctgctgatgatcctgtgcaacatcgtccactacttctccaccccctatttgatgatgaagaactccctgtccaagatgaacgccggctgggagaccacagccatgctcatgggggacagctggctccagaccatcctccgggtggtcacccccaacgctctgtccagtctcatcgaggtgttcagctactacttcatcaattccatggtcaccatcagcgccctcattttcatcgccggggcccggaccatggttctcaccaccatgatcaagcagctgcagtacgtgaaccgcttcaacgaggtgttcgtcctctccctgctgatcctggccactaacctgatcgccaaggggctcttctcctgcctggccagctataaggcatcccatccggtgaaagagcgccgttccatccaactctttggaaacagaaaggaagcagtccaatgaatttcaaaaaatacctcgccctgggaaccgccctgaccctgacccttctcgccggctgcggcagctccggctccggcgatgaccagatcgtcatctactccaacgccgatgaggaggccgtcactgccatggagaacgctctggacgcaggcggctatgagggcaagtatatcgtgcagacctacggcacctccgagctggggggcaagctgctggccgagggcaccaacctagaggcggatctcgtgaccatgagcaccttctatctccagagcgcccaggagcagaacaacatgttcctgcccctggactttgaggtgaacaccctggaggaggtgcctgactacaccgcccccatcacctcccaggagggggccatcatcctgaacactgagctgatggcctcagagaacctgcccactcccacctgcctgaaggacctggctgacccagtgtacgccggacaggtggccgtcactgacatccagtcctcctccaccgcatggctgctgatccaggccctggtggacgcctacggcgaggacggggccgaggagacgctggccgccatctatgacaactgcggcgcccacatcgagacctccggctccggccccctgaagctgtgccgggccggcgaggtggccatcggcttcggtctgcgccaccaggcagtggccgacaaggctgacggcctgcccatcgactacgtggaccccacggagggcaacttctcccttactgagtccgtggccgtcctggacaagggggaggacaccaaccccctggccatggagatggcgcggtgcatcatagaaaacggccgcgccgagctgatccaaacctacccgaatcccctctatgagggcgagaccgccgaccccgccaaccagtccgactaccccagcatctttgacgagcccctgaccttcgagctgttcaccgcccaccaggagctctccgaacgggccaagggctgaactggcttgtctgtgagaaaaggaggaaccgaccatgaatacctataaactactgacccccgggcccctgaccaccaccgacacggtgaaggaggagatgctggtggaccggtgcacctgggatgacgactacaaggccgtcacccagaagatccgccgccagctgctccagctggggcacgtgtcggaggatgactacacggccgtcctgatgcagggcagcggcaccttcggagtggagagcgtcctctccagcgtggtgggggacgaggacaaggtcctcatctgctccaacggggcctacggggtgcgcatgacccggatctgtgaccggaaccgcattccctatgtccactacgccgagagttatgaccacatccccgaccccgcccgcgtcgcccgtctgctggctcaggacccggccattacccacgtggccatggtccacagtgagaccaccagcggcatcctcaacgacatccagtccgtgggcaaggtggtccgggacgccgggcggaccttcatcgtggacgccatgtcctccttcggcggggtggatatccccgtctccgactggggcatcgactttctggtgtccagcgccaacaagtgcatccagggagtacccggcttctccttcatcctgtgccgccgggacaagctgctctccagcgagggcaaggcccgctctctgtccctggacctgctggaccagtggaaggggatggagaaggacggcaagtggcgcttcacctcccccacccatgtggtgctggccttctccaaggcactggacgagctggaggcggaggggggcatccccgcccggcaccgccgctatgccgagaacaaccgcctgctcattgagaagatgcgcgccatgggatttgccccatacatcgacgggagccgacagggccccatcatcaccaccttcttctatcccgccggggtacccttccagttctccgagttttacacctacatcaaggagcggggctacgtcctctacccgggcaagctcaccgatgcagataccttccgggtgggcaacatcggagagatctacccggaggatattgagaaacttgcttccatcatcgccggcttcctggctgcccataaggaggagatcgcatgatccaggccgtcatctttgactgggcgggcaccactgtggactacggctgctttgcccccgtccaggcctttcaggaggccttcgcccaccacggcgtgccggtcaccctggaggagacccgtaagcccatgggtatgctgaagcgggaccacatccgcaccatgctccggatggagcgcatcgcccgggcctgggaggagacccacggccgccccgcgggggaggaggacgtggaggctgtgtacgccctgtttgagcccaagctcttctccatcctggaccggttttccacacccaagccgtttgcggtggaaacagcggccgccctgcgggagatggggctgaagatcggctccaccaccggctataccgactccatgatgcacattgtcgcacccaaggccgcccggctgggctacgcccccgacttctggatcagccccgacggggtgggcggcaggggccgtcccgatccctacatgatctttgaaaacctgaaggcgctggaggtccccagtgtgaagaacgccgtgaaggtgggggacactgtctccgacatccgggagggggtcaatgccggcgtgtggtcggtgggggtcatcgagggcagctccgtcctgggtctgagccagacagagtacgaggccctcactccggaggagcgcagggatgtctgccgccgggcagaggagaccttccgcgccgctggagcccactttgtgctgaacgatttgtcccagctgccggagctcattcggatgatcgggtaatcacaacccaagtacatctcaactgatgctgcccccaggccatgcagatggagaaagcgacagcagcccataacccgcaggccgttggttcaaatccggccccagcagccacaaagccgtctgattttttaagaaatcagacggcttttccgtgcataaagagaactgccggaacagccggaggttccccaaagcctaagctctgaaaaagcatcctcctttgctggaatggaagagagctgccaaccaccggaacgaacaaaaggaggaatcaagtccggatgaaatctgaatgggcgtcatcaatgaatggatttggcagttaagtgagagaaaggcaagggaccttctggaaatcagctatgtgggccgtagacgtgtctcctaccatttccggttctcaattcgagccgattgactggactgaaaagcgctcagaagcagccgttgcaggcactgggccggactgtgctgcccacgattctcgtaccattaagattttgccggcaggtcagaagaacaaactctctatgtgagaggtgtgccggctcccgaagtaagacttagcggccttcggctccaggtttgtggctttgcttggccggaacagcgggatcctccgccggactgattgcgcccgaagaccccaatatttcatttccgggcattgaatatttcgcctcacaaagccgtcgccccgatagctctctccccacgaaccgggacgatggaggggcctgtccgtgcggcggtttgcatatacgccgacagccggaaaatccgcaaaaatgattcagcaccttttcttttcgacaaaatacgatataataaagaaaaacgcctgttccacagccgggacgctgcctctccgtttgcatggaatggattcggtgggatttgccggcgggagctgtttgaaattcagaacactgcgtatggggaggagactcatgatttcgctgtttcttgttgaggatgagcggattgcccgggagagtatccgagacaatgttccttggcaggaacacgatatcctgttcctgggggatgcgccggatggagaagtcgctctgccgcagctcctggaaaaacggccggatattctgctgacggacatcaagatgccgtttatggacggcctggagctggcccggatcgtgcggaaggagctgccggatacccgcatcatcatcctcagcggacacaatgaatttgaatatgccagaaaggccatcaccctgggcgtaaatgactatctgctcaagcctgtctccagcagggatattctggaagccgtggaccgcagcaaggcgcagattttggaatgccgcgcacggcggattgagcggcagagccatagcatcacacagcgggagctctttttcagcaatctgtacagcggcatcctgatgggaccggcgcagatgctccagcgtgcggcgcagcttgggatctctttggctgcaggagcctaccagatcatcctgacggagctggacggtgtgataccggatcgggaggcgctgcgggacaagctgtatgccgcgccaatggcatacggctccggctttgatggggagcgggccacgttcctgctgctggcggaagacgcggccgggcttcccccaaaattgcgggagttctctgcatggctggaggcgctggccgggcaggagggactgagcgtgcatctgctgcctggaaaacaggcggcccggctcagcgacctgccgaaagcataccatctgctgacgattcagaaaaagcagcgggagtccgcagacagcaagacgctgtcccactccacctccttccagcgggacaccctgctggactttttgcggactgggaagccgtctgcacttccgtcattttgggcccactaccggccgaccatcgagtccgggtattcctcctttgtctatcgctgctatctctatacagagcttttctttgtggtccatgagttctgccaggaaaaccggatcccccttccggaatccctgcgccaggaggatctgctggaaaagcgtattctgctgacgaattccgtagatgatttcctgacgctggcttgccagctctgcgaagaggtgatggaggtccgccccgggggcagccggcacacgccctccgcagagcaagccagagcgtatatcgaccgccactatatggacccggagctgtccctctcctcggttgcgaatgcagtgtctgtaagccccaaccacctcagcacgcttttcaaatccaaaattggcgtcgggttcagtgaatatctgacggaggtccgaattcgccaggccaaacgcctgctgattaccagcgatctgcgggtcagtgaggtcggagaacgggtggggtatcagaatatggagtatttcagcatgctgttcaagaaaaacaccgggcagacgcccagccagtaccgccgctcccacacgctatgagacggatgagtcgtgcagccggcgccctgaaaaccgccctgggccgccgtgggagcatacggagcaagatcctggcggggtttacggtcatcctggtggggatgttgagtatcaacctgctggttatcggcctgtcccaccactttttgggagaataccatatcctggcggagcgggtcatttccgcaaacaagctgatccccactgtccgggatgacgtgagcctggacgcctattatctggtggcggggcgccgcaccctggagacgacccagctcttccaccacatggaggaaattcgccaggggctgtatctgctgaagcaggagaacaattctgaaaacggccggatccagctgcagattgccacgcgcaccttcggcaccctgcagcggtactgtcagaagctggggcaggagattgatgcggacgtgtccctggaactgcagaatgtgacgctggagcagattcgggatgtctccgccctggtgtacaaccagattgaggaatacatttatctggagctgctctggggggagtccattgatcagatgctccagaccggatttcagctgctgctgctggggatctggcggcggtggtgctgatggtggcggttctggcatttttgctgatgcgcatcaaccggaccatcaacgaccccatccaggcgctggtggaaaacacccggcggctggcggagggcgactttgatgccctgatggaagatgccggggagaatgaggtcaccatcctcaacaagagcttcaaccgcatggcggcaaaactccagcgcctgatggaaaaagtggaggaggacacccgcacccaggagcagctggagctgcggctgcttcaggaacagatcaatccccactttctctacaacacgctggagatcatcgtctggctggcggagtccggggataaggagcaggtcattcaggtggtccagtccctctcccggtttttccgggtggtcctcagcaaaggccgcgcagtggtgtcccttcaggaggagctgtcctgcatccaaagctatctctatattcagaaagtgcgctatgccgatatcctgaactatgagatccaggcggagcccgaagccttggactgccggatccaaaagctgagcctgcagccccttgtggaaaacgcgctgtaccacggcattgaaaagaagcgggggggcggcaccatccgcgtctgcgccgatgtgaaggacggctgcctggtggttcaggtggcggacgacggctgcggcatgacgcctgagaaattggaggaagtgcaacgggaggtggccggagatctcggtcagatctccgagggcgggtttgggctgcccaatatccaaaagcgcattcagctggcctatggagcggattacggcattcacgtgagttctcggctgggctgcgggacccgggtcacgctacagattccggcaaaatcgtaaaaaagctgagaagcagcagaaaaaagcaaaagtccggctttccggccggacttttttctgtaaaattcaaataaaaacccgttggagcgcctcttttcaaaggtggaggcgtcttgtatattatttaacacagggcgcgagaccgcccattcggaagatgaagaaagcgagaaaggattgaaaggtatgaaactgaagaaatggttgaccggcgttttggccgctgcgatggccctgtctctggccgcctgcagtgatggaggcgcggaaagcgccgatgccggcagtgaggacagcatcacccttggatttgcccaggtcggttctgagagcgagtggcgcactgccaacaccgacaacatcaaggctgccgcggaggccgccggcgtgaccctccagttctccgacgcacagcagaagcaggagaaccagatcaaggccatccgctccttcatcgcatctgacgtggatgtgatctccttctgccccatcgtggagaccggctgggatacggtcctgcaggaggccaaggacgccgggatcccggtggtcctggtggaccgcggcgtgactgcggacccctctctgtatgtgacccacatctttgccgacgccctgaaggagggtgccaatgccttcaattgggttgacgagtatatgactgctgagggcaagactccccgtgccggcggcgatcagttccaggtggcgattctggagggcacggtcggctcctccgtggccgccgaccgcctgcagggcttcaacgatgccatggccgaatcccccaacagcggcaagtacaacgtcatctgttcccagaccggtgagtacacccgtgccaagggcatggaggtcatggagtccttcctgaagtccgacggggacaagatcgatattctcttctcctgcaacggcgatatggctctgggcgctattcaggccattgaggctgccggactgaagcccggtgaggacatcgtcatcgtctccatcgacgccgccaagggcgagttcaacgctatgatcgagggcaagatgaactgcgccgtggagcacacccccaacttcggcgagaccctgatggaaaccgccaagaagattgtggccggcgaagaagtacccgccaccattgagctggaagaggggatcttccccgctgacattgccgagcaggagctgcccaaccgcacctattgaccggctttcgccaaccgttccatgatcccgcgggcgggggatgtcctccccgcccgcggactgttttgccctggctccccagggcctccggcgggatgccagacccgccgaatccaagacaaaggatgtgatgacctgtggcagaagaagccctgttgacaatgcggggaatctgtaaatacttccccggcgtccgcgcgctggagaatgtggatttcaccctgcactccggtgaagtccacgcgctggtcggcgaaaacggcgcgggaaaatccaccctgattaaggtcctgaccggcgtccacgcaaaggacggcggcaagatcgccatggagggcaggcccatttccccctccagcccgctggaggccatgaagtgcggcatttccaccgtgtatcaggaggtcaacctgtgccccaatctgagcgtggcggagaacatctttatcggccgtgagccaaaaaaggcgggcggcatcgactggaagaccatcaaccgccgggccgcggagctgctgactacgctgaatctgaacattgacgtgacaaagacgctggggagctactcggtggccgtccagcagatgattgccattgcccgtgcggtggatgtggacgcaaaggtgctgatcctggacgagcccacctcctccctggatgaggaggagacccagcgcctgttcgcagtggtccgcaagctgaaggcccagggcctgggggtcatctttgtctcccacttcctggatcagatctatgagctctgcgaccggatcacggtgctgcgcaacggtgagctggtgggcgcctatgccgtggcggagctgccccgggtggagctgatctccaagatgatcggcaaggagctgggggatattcagagcatgggcaaaaacaccgccctgtgcggggacgaggtgctgatcgaggccgacggactctccgcgttcggccgtatccaggattttgacctgcagatccacaggggcgaagtcgtgggctttgccggcctgttgggctcaggccgcacggaaacggcagagcttctggccggcgtggccaagcccgaacagggcgcactgcggatgaacggccgggaagtccatttcaactcccccctggacgccatgcaccacaagatcgccttctgcccggaggaccggaagatccagggcatcatcggggacctctccgtccgggagaacatcatcatcggccttcaggccaaaaagggcatgtggaaccacatccccctgaaggagcaggagcggatcgccgacgagtacatcaagctgctgcagatcaaggtctcctctccggagcagctgatccgcaacctctccggcggcaaccagcagaaggccatcatcgcccgctggctggtgacgcagccggatctgctgatcctggatgagcccacccgcggcatcgacatcggcaccaagacggagatccagaaaatggtgatccagctggcccgggagcagcacatgtccatcatcttcatctccagcgagattgacgagatgacccgcacctgcacacgcctggcagtcctgcgggaccggcggaaggtggcggaactgaccggcgacgacatcaactccgaccgggtgatggcagccattgcaggaggtgcctaaatgatgggaaaagtgaaaaaggtgacgtccaaccacctgtttctgccgctgtttgccctggctctgctgctggtgttcaacgcgtttgccacccccggcttttttgccattgagttccagaacggccagttttacgggcgcattattgacattctcaaccgggcttcgatcctggtgatcttgtctatgggcatgaccttcgtcatcgccaccgggggcatcgacatctcccagggttctgtcatcgccatctccggcgccatctgctgctccctgatcggcggagcaggggacggcaccgccaatatgccgctgctgccggcctgtctgatcgccgtgctggtctgcgccctgtgcggcgtgtggaacggcttcctggtctccaagctgaagatccagcccatggtggccacactgatcctgctgaccgccggacgaggcatcgccatgctgattaccaaggggcagaatgtcaccgtgtactatgagcccttcacctacatcggcaccaccattcccggcagccccctgcctaccaccatcttcattgccgccctcatggtgctgtttgtggttctgatccagaaaaagacgtctgtgggactgttcgtccaggcggtgggcatcaatgccaacgccgcccggcgcacgggcctcaaggtctcctccatcatctttatggtgtacgtcttctccggcatctgcgccggcattgccggactgatggaatcctccatgatcgcggcggcggaccccaacaacgccggcctcaacatggagatggacgccatcttgtccgtggccctgggcggaacgcttctcagcggcggcaaattctacatcggcggctccatcatcggcgccatcaccatccagacgatgaccaccacgctgtacgcgctgggcgtctcctcggagcagctgccggtatacaaggcccttgtggtcattttgatctgcctcctccagtccgaaaaattcaagggtgttctggagaagcgcacagcagaaaaggcggtgaagcagagatgaagcagaagagcagcctgaaagaccgcctggtcggttcccggtatttttccttcggcatcaccctgagcctgttcgtgctgctgtatgtggtcggcatgatgaactaccggggcttcatgaagccccaggtgttctgcaacctgctgatcgacaatgcggccctgattattgccaccatcggcatcacctttgtcctgctgatcggcgggattgacatctccatcggctctgtggtggcgctgacctgtatgtcgtcggcgcagatgctgcagaacacgggcctgcccgcgcccgccgtcatcctgatcgtgctggccatgggggctgtgttcggcctggtccagggctggctgattacggaattcaacatgcagcccttcattgtcacgctggcggggcagttcttcgcccgcggcatgacggcgatcatctcccgggagacgattgttattgacaatcccgtgtacacctcgctggcgtccgcacggatctatgtcctgcccggcggattcatctccgtgggcgtggtgatcgcgctggtgacgctggttgcggccacattggtgctgaagttcacccgattcggccggaacatctacgcgctgggcggaaatgagatgtctgcgcagctgatgggccttcccaccaaacggacgaaaatcctcgcctacgtggtgtgcggcttctgctcggcgctggccggtgtggtctactccctcatcatgctctccgggtatcccctccacgccgtcagcatggagatggacgccatcgcctcctccgtgatcggcggcacgctgatgtccggcggcgtggccttcctgccaggcacccttctcggcgtgctgatccagggtgtgatccaaaccttcatcaccttccaggggacgctctccgcctggtggacgcgcatcatcatcgccctgctgctgtgcctgttcattgtgatccaggcggtggtcagccgcagccggcagcgcctcaactctgagcactgatttttcccaatcttcttttcttcttttttccggcacagtcaccaggcacgtcctggtggctgtgtccatttcaggaggtttcggcatggacgctttactcatcaaaaccggcgggctgctgctgatcgtggcgctgggataccttctcaagagacggggcgtctttcagcagggcgatgcccgtctgctgtccaggatcatcgtcaacctgacgctgccgggggctctcctctccagcttcagcgcgttcaggctggttccgtccctgctggcggttctcgccgcggcagcagccgccaatgtcctgctgctggctgtctccgccctggtgacccgggggcggccggggcccgtccgggcgctctacctgctcaacgcccccagctacaacatcggcacctttgtcctgccctttgtgcagagctttctgccgccggacatgctgctggccgtctccatgtttgacgcgggcaacagccccttcaactgcggcggcgcctatgcactgacggccgccctcaccggcggggagcgcctgacggtccgctccgttctgggcagaatgctccgctccgtgcccttcgacacctttttggtcattctgctcctggggctgctcggcctgcgcctgccgcagccggtttacaccgtggcggggatgttcggccaggccaacgcctttctggcgatgctgatgatcggattgctgctggagccgcggattccgcaggagagccggtccgacgttctgcgggtggttctgctgcgctacggattcggcctggcggcctccgccgtctgctggatgctgccgctgcctgccgggatccggcaggtgctggcgctgagccttctggcgccggtgccctctgtctccctggcctactgtgagcggtgcggctgtgattccggcgccgtgggggcgatccactccctctgcatccccatcagcctggcctttacgctgctggtgtgcctgatgtgatgggacgacgcctattgccgtttgcccgctgcgttgtgctccgggcagggggcagctgcggcctccaggaattttcctggaggccgcggctgttgggaagatggacgcttgcgtgtctggatttatgggctgtttctgccggggcggcgtggcggccctttgcgtcctgtaaaaaattcttggctgttgtcctggagggcgtaagtctgacagggagacagctgtcccagagaggagggcgcagatttccagcttcgctcccggagggggaggaaaagaagagtcattcgtatggaggtcaacagcggccacacactctatctatgctggttcgaccttggaagtctgggcgcgaagtaaatatgccccccggctctaaagagccggggggcgcaacagttttcaggtaattctttacttggaaacggtcacggtgatatcggtggcaattgcgccgacattgttgattgtgatggtctgggtcttgtttccggtagcatcaccaattccgctagcagtgacagggaccttggaaccgtcagtgctgttagcattgaacgtgctgccgaaggtgctggtgttgtgagtcagaacgatcttaacctgacccttcgccgcaacatactcagaaccctctgcaatttccacactgatggttttagcatcaaccagagcctggacatcagcgtccagcttcaggttgacaacataaacctgggtggccgtcacggtggcgttcttcacggtgccgccattgggcttggtgtaagtccactttgcagtgccgctaacatcctcaacggagatatcggtgcagcccttgtcctgcaggatggcgatgatgtcatcctcactcagagtgatcttgccggcctcacggtagtactcgatggtggtggtggagcccagggacacatcacggacctcgatatccttgctcagctcaggcttatcgtcgccagaggacttgtcatcgacttcctcgatcaccaggaactcgaccaggtactcgtccacaacagcatagaccttgtcgttgctgtccttggcgatggcgcgataagaactggtctcaatattgccatcctcgtccacatagaagatcttggcgtcgtcggccacggtgatggtgtagttggtgtcatccttgtggttcgcagtatccagcaggaccgtgtagtcggcggagatcttgtcaatgccagcgccggtcaggtactccttgccggagtcaccctcgccatcgatgaaggacacatagccgtgatcgccgttggtagagaccttggtaatgataccatacttgtcaacggagtagttcttgtacatgccgttgaggttcttgccctggttctcgtccaccttgacggtctggacctcgccgttgacgatggcctgatactcgaagtagtcgccgtccttgtcgtggatcaggttggagacagactccttggccaggaacagggtggtgttgctgtcgtcctcgatggcagagccgtcctgaacgaagatgaacatgatggtggccatcttgccgctcttgcagtaggcataagactcaaccttggtcgtgctgccgtcgatgctgggagcgttcttgatgccggtgtagaccgtgtaatcatcgctggtgtcgttgtacaccacgaacacagtgctgctgttggtggtcacggtcttgccgctataaagtgtgacagtggccttgtcgttctccatggagaagtcggtgttgttacttgtgtaatcaccgatatcagtatcagtggggatgttctcgctggtgagagttgccttgacagccttcagggtgtagtcgccgtcctcgtccacgcgataagtgacgatggtgccgttatcaatcttatcgtcgccgttcttgtagttttcggtggtgtcaacaaccttttccgtgccgtcggcaaagaccagcagagcgcggttgttggagaagtcacccttgtcctgcgtattcatcagcagggcatagtcgccaatctcgtcaacttcctcgacatagatcaggtagccataggcgtccagatagacatcatagtcctcgtccacgctgacattgccaatgtcctcgccggcgatgttcttggaagcggtgtaacgggtgccgtcaatggtcagagccttgcgctcgtcctcgtccttggcattgttctcagcccgggtcacggtgccggagacctgctcagccagagccacggacttgacctcgtcggcagactgagagtaggtgtacaggacataggcgtcatcctcgaactcttcgacggtctcaaagtcctgaatgccgttcacaccgtcgggcttcacatcctcaacagcgatctccacataggcgtccttgttgcccttggcagccacggaacggttgatggtgcccacataggtgttcaccatagtgatcacgacggtgtcgtcgtcatcatcatagaagacctcggtcagaacgccgttggcgccgaactcggtgtcgtcgtcgttcttggtgatgtcaacagccttgtccttcagctcagcgccgtcctcatagacggtgacgtccttcttgtccacgctgctgcccaggtccaggtcggcatagatatcgtccacggcgaccttggcggtgtaagaagcgtcagcctccttggcgtaggtgccgatcttctcggccttcagacgccacacgttggcgggacgggcgaaatcatccgtgccgtcggacagcttcagatcgtcgaagtaacgctcggcgaactgcatcttgttgtcctcgctgatgctctcgttcttgtcgttgttgacaacatccttccggctggaagtggtgttgatggtgatgtcacccacaacgatggtgttctgctggtcatactccaccatggtggcctgcagcatgttgaacgcatacagggcagcctcctggcgggtcacggccttggagccaacgaactcgtcgttgccgtcgtccaggccaatgcccacggcctgcttgatgacggacacggtccagttggggccggtgtagccctcgatggagctgtcatagcccagagcgcccagcagcatcttcatgaacgcgttgccgctcagggtgccggtgggacggaaggtgccgtcagcgtagccgctgatgataccctgctgagagcagtaggtgatgtagcccgcgaaggtgttggtcacgggaacatccttgaaggggcggtgcctgcgctcagagcggaggcagtggtggggcccaggatcaggttgcagatgatcttggcggccgcaccgcgggtcaggacatcatcgggacggaagtcgccgccggaataaccgtcgacaacgcccagagcagagatcacatccacagcttccttgtaggtgatctcgctgtcgtccgtgaagtccttggcgccggcgctgacggtgaccagagacatggtcatcaccagagcaagcaccagagaaaggaacttcttcatttgggatttctcctcctttaaaatatttgcggtccgccggtatgcctgccgccgggtctgagattcgtgtgggggctagccaaccaacttgtgtcggcctacaccaaccacagagccggccgccagtgacactcccgccgtccgcaacgccaatgtatcagtgtttttccggattgtctacggattcggcgcgattgttattcaaacgaaacacgccgttcaaaagcgtctgattcgtggtaatttatgtaacaaaagttgcagatttccaaaaaagagagaggcgggaaaccggggctgcccggtctcacgcctccttctgcaagaggatgtatttctgcccgtccttggcgatctggtgctccgccagcatccgctggagaatgggccagcactggcgggggccgattcgcagcacccgggcaatgtcctggcggtaggcaaaccccgcttccgacaggtacgccaggatcgcctgctcctggtcctccggcggcaccaccgtgctgggcaggtaatagcggtttcccactttggtcagctttccccgggccaccatctgccgaagccggttgtaggccgtgttcttggagacccgcagaagggccatcacctcattccgggtgatggagccctggcgccggacaacgtccagcacctggttctcgccgcccacccggatgtcgtagtccaggcgcaggtcccgcagggagagatcgtccagcccgccctgcaccagcgccgcccgcaccagcttggacaggcgggtgcgctcataggggcggcggctgcggggggacatcaggacccactccgcctctggcggcgccgccttgcgcagcttctggagaatggacaggacgccgctggtcaggcggacttgccggtccggcaggataagccgctccttctgcaggtccacctggtcccaccgcagcgacgcgatctcctccacctggagccccagctgccaggtgagccacagggccgccccggcgggggtgtcctgttccgcctgcagcagcttccagagggcgaactcgtcgatctgcggcgctgccttccggcggatgcgggtggagaccttcttctccgtcaggtaggccgcgaagtggacgttcatggcggcggcctccagcccggtgatccgggagacgtactgccagtcgtgacgttccagctgccgcagaacgtagtcgtggcgcaggtcgatcaggcggacggccttcaggtccccggcgtccagcgcggcgcgggccaggcgggagatggactgggccgccaggggctgctggtcccggtccgacagcaccacccgttcgctgctgccgttccgctcccggcgcagggcctccagccaggcggccagctccggggccagcgggaccgcccggtccggcagcaggagctgttcgcccagcagatccacctgagcccaggtgaggtgctggatttcgtcccgcatcagaccggccatccacgccagccgcaggatggctcccgcggcatcatttgtatgctgttccagcacccggcaaagcaaggctccatcggggcggttgagcgtgtaactctgcatggcgtctcctcgttttgttacgcttgtgtgtcacaaaaatgaccttcctgcttttggaagcctgcgggtgacggaatcttctctataagctaacgttttttgtgacaattgttatgcacgtgaaaccgcttttgaaaaaactcctaatccattgcaccacaatggatacggagattttctcactcaaaatatacactataagataactaaaatcaatatcttatagcatattttgaatggacacgttccagaatagacttattctaaaaggagcgtgaaacagatgacaaaacaggagcgagtcgccatggggcaccggctgcggcagcagaggacccttctgggcctcacccgggaggagtttgccgagctggcggatatcagcgccggctattacggccagatcgaggtggggacctcgcagatgtccattgacacgctgattaaattatcgaagacgtcgcagctctcaatggagtatatccttttgggagaggagattcagcccgatgcagatctgaccgccatagaggccctgctggcccggtgcacgccccgggaggtccggctggctgagaaggtcctccggctgtttctgctgcggggagacgcatagcgggcctgcggcggccggatagatctgcgcccgctgggttgaaaaaccggatccacttcttgattcggcggccgccatccactaaaatagggaggtaaacccgcagggcggagaaacggatatgcgagaaaggacgggatcccatggaactgcagaagggacagaagtgcaaactggcggacctgaccggaagcggacagctgcgaatctccgtgacggtgtccctgccggggagcgaggcggacgtgacctgcttcggcgtggacggagcggggaagttgtccgacgaccgttattttattttttacaaccagaccagttcgccggagggcgccgtctccatgcaccagtccggggagtccacggtattctcggtggacctgaaccgccttccgggcttcctgcagaggctggtggtgacggtggcggcggagagcggcaccatgcaggcgctggcccggggactcctgacgctggaaggagagttggaccgggcggcctatgtcttcaccggtgcggggtatcaacaggagaaggccctgattctctgcgaggtgtaccgcaaggatgggatttggcgcttttccgtggtggacagcggcttcaacgggggactctccgccctgctggcccacttcggcggggaggaggtcaagcctgacccgccgaccccggcacccgctccgccggagccgaaggtgaatctctccaaaatcagcctgaagaagagcggagagagccacaagatcgacctgacgaaaaaccgtcggcgcatccacgtgaacctgaactgggaccagcggcggggcctgttcagccggggcatcgacctggatctggcctgtatgtaccggctgaaggacgggcggcagggggtcatccaggccctgggcaacagcttcggtgccgccgatcagcccccctacatcaagctggacaaggacgaccgctccggcgccagcgccaacggcgaaaacatggacttcttccggccggagctgatcgacttcgccgtggttttcgccttcatctatgagggcgtgcccaactggcggtccaccaacgcccgggtggtgttgagccagcagggggcgccggatattgaggtccagatcgacaaccccaacagcaacgaacggttctgcgtcctggccagcctcaccggccgggacggcgggctggaggtccggcgggaggacttgtttttcaacagccaccgggctgtggacgcccattaccacttcggcttccgctgggtggcgggccacaaataacacgggagaggagccgaagtcatgttggatttgcagcggggacagaagatctccattcaaaccgtctgccggacctggaccctggaggtggagctgcggcatcaggggcccctggcggtcgacgtgtcctgctttggcctggacagcgcaggccgcctctccgacgagcggtattttcttttctataaccagcggcgctcgccggaaggggccatggccctctctgagggagcatccggcggaacggcccgattccaggtggatctggcggccctgccggaccatatccagcggctctccttcactgccgccattgacggcggccgcaccctgcgggagctggaacagggcagcatcggtctgtgggtcagaggggaggagatggcccggtatgcctacgcggggaacgagttctccggggagcgagccatcgtggccggcgagctctaccggaaaaacggggactggaagttcagcgccgtgggccggggcttcaacggcggcctccgggccctggtggagagcttcggcggcgtggtgtcagacccggtcccgccgcctccgccgcctgtccggacagctgtgtctgcccggacaacccggcagccggccgcgcccgccggcggtccgcctccttccgtgggggacatcctgcgctccctgccgccccatgtctgcacccgcatggaggggctggcccgccgctgccaaggggacctggacttcctggcgccgttgtacaaagcctcctttgcagcactggcccaggtgccccgggcagcggagagggaccttcagacggtcctgtgcgccgatgcctccggctccatgttcgacctgtaccgcgggggccgggtccagcagatgttcgacaagttcttcgccctgtcctccaccctgtcagacagcggcgccctggactgctgggcctttgctgcgaagagccgccagctggagccggtgacgctggataacatccgggactacaccttctctcaggccggcggatacgagcggtggatgagcatgctcaactaccagtacaacaacgagccggaggccatgcgggacatcatgatgatctacggcggcctgcgcaggcccattctggtgctgttcctgacggatggccggttgcagtccgactgggagatcgaggagatcctcatcaagacctcccgtttccccgtgttctggcagttcatcggcctctatggcgaagagtacggcgtgctgaatcacctggatgagatcgacggccgccacacccagaacgccgcctttttgaagatggaggatttcgacgatttcatggacagcggcttttaccggaccattttcgcaaacacggccgcttggctggaggagctggaccggaagcagatgctgccgtagaggagatgcgctggggcggatgctatttacggggcagcagggggcgggagccgaggcatgggactttttcgggtgtcaaatgatgcggagactgtgaaaagcccctgggatggaacccggcgcatcagggattttgccgctgggcattgcgcactccagctgatgcggccctgcgggatacccctggttgcccggagcggcaggccgtgaggctgcgggatggctgtgccttcggatgcggcacgtctccatgcttctgtcaggggccatcccggcgctctcgggtttgcgttacccccttgcccggacaggaaaaagaaggtataatcattttgttccatcacagcgggcggacagcccgcggcaaggagaaactgaggaggtcttcttatgctgtgcacgagagaagtcacggtccaggtccctgacggcctgcaccatcagacggcggcccggttcatccagactgccaaccgctttaccagcgttgtccgcgtcgtatacggcgacaacaacgtcaatgccaaaagcctgctgggtgtgctctccctgtccatcggagcggggacgcggatcacgatcaccgcagacggagcggatgccggagaggcgctggatgcgctggagcagtgccttgccggggcgtgagcctttggagcagacctgatctcctgaatcaaagaggggccgccggcaaagccggcggcccctctttacagaaatgcgcggggaccggacaggcatccggtccccgcgcactctgagattgatcgtctgacaagcgtcagtctgccgtctcctcccggccgaccttcacgcccatcttgtcctcgtaatacttgaccagtgccgcctggtcctcgtcgatgtggccgttgtcgttcatccagtccatcacatggaggaccacatctgtcagcggcgtgtcgatgtccagcttgtgggcatagtgcttggcgttcaggatgtccttccggtggacggcgatccgcgcgccgggggtgtagtcccgcttaatgatcttgggcaccttgttgtcgtacatgggaccgccggcaaagccgccccgggtggcctcgaacgtggtctgcaggtcgatgcccgccttggccgcgaaggcatagccctccgcaatggccaccaggatggcgccgccgatcatgttgttcaccagcttggtgacgctgccgctggcggggccgccggtgtaaacgggactgcccatgcacgccaggaccggctttaccttgtcaaaggcctctttgtcgccgccggtcataatggccagcgtcccggcgatggccatggggttgccgccgctgaccggggagtccagcaggaacatccccgcgtccttggcctgctggtacagctccagaatgatgtccggtgcggtggagctcaggtccacaatcacattgccgggcttaccgtactggatggcctgctccacgctgttgcggatgatgggatgggtgggcaggatctggaggatcacgtcgcaggccttgtagatttctgccgggtcactgacggggatgccgcctgcctcccggaaggcgtccatctgctgctggaccacatcgtagcccagcacgggcagcccgcacttctgcaccacgtttttcgccataggcagtcccatgacgcccattcccaaaaatccgattttttgcatatccaagacttcctttcttcgcaatcagcccgccatgatgctgggaagcaaggtggtgaggggcgagacataggtgatgaggaacaacacgataatggagatcagcagcatgggcatcatggccttcagggagtgagacagccgggtttcgccggtctggttgcacagcagcagacacaggcccaccggcggcgtcaccagaccgatgcagaggttgaagctcatgacgatgccgaactgcagcagatcgatgccgaaggcattcaacagcggcagcaggatcggggtcatcatcaccacagccgcattggcctccatcagcataccgatgatcaggaacagaatgttcagcagcagcagaatgacgacggggctgtttgtgatggagctgaagaaggagaccagctgctggggcaggccggaggtggtgattacatagctggaggcggaggacaggcccaccatcaccatgatggtggcggtggaaactgcgccctccacaaacacctggggcagctccttgaagctcatgtccttgtatacgaagaggctgatgatcaggctgtacaccactgccacggcagaggcctcggtgggggtgaagatgccgccgaagatgccgcccaggatgatgatgggcatcagcagcgcccagatgcccttgcgcacggaggagccgatcttcctcaggttgggcttctcatgggccggcagattgtgcttgtggccgtaatacaggccgtaggcaatcagagccaccgccagaatgatgcccggcaacacggagcccaggaacagctccgccacggacacattggtgatgctggcgtacacgatcagcacaatggagggcggaatgatgggacccaggatggaggagatggacgctacgcccacggcgaagggggcgggatagccctcccgcttcatggcggggatggtgatgccgccgatggcggaggcggtggccacgccggagccggagatagcgccgaacagggcggaggccagaatggtcaccagggacaggctgcccttgatgtgtcctataatggcattacaaatgtcaatcagttttcctgtaatactgcgggacatgatattgcccgccagaatgaagaaggggatggccagcagggcgctgccgttcatgcccgcgaacattctctgaggcagcacaatcaggggcaggtccgccaggttcagggccgccagggcgccgatgcccagggcgatgtagatggggaatcccaggagggcgagacccagcagcagaatgatgattaacaggccggcgttcatacctgggcctcctttccggccccgcgcagggcagagatgttcttgaagaggacctcaatggaagtcaggagcatcagcacgatgccgacgggcatacaggaataggggatggacatggggatcccaagccccgcagacatggtgcgggcgccggtctgcaccagggtgatggagtaggacagcaggaataccatgaacaccatgccggccagagtggcgatgatggtgaggatggtccgcaccttcggcttcatcagattgatgagaatgtcgatctgcagatggctgttgcggcggatggcaatggctgcaccgatcatcacgtcgtaaatgaacagataccgggccagctcctcgctccaggagttggcgtgggcaaagatgtaccgcatgatgacctggtaggcgatgatgatgaccataatccctacggtgacagccaggatcgctttctcgaccttctccaggacatctaggaatttggaatatcctctcagcatgtttgacacctcgctatgtccttcgtggcggttgtcaggcattgggagccagtgcacggatctggttgcaccagtcggccagatcggggaagttggcctccgcatagccgctgaaatgctcggtaaaggcggcgttgtccacatccacaaaggtgacgccttccgcggtcagctcttccttggcggcatcctcccgctccagcacctcctgaccgatctgctcgccggcatagacggcagcctcctccagcgcggactggatgtcctccggcagggattcaaagtacgccttatccatgataatggtgttggcgctgtatacatggttggtcagaatccagtaggggcagacctcctggaaggaatagctctgggagtccaggatggagttctcctgcccatccacggtgccctgctgcaaagccgtgtaggtctcgcccatagccaggggagtcggggcggagcccatccactcccaaaccttgatgtagccctccagattggggctgcggagcttgaagccggcgaagtcctccacggtcttcatctccttggtggcggtcacgatccgggcaccacggtaaccggcgcccatcagcttgaagccggagtcattgcccacggtgtctagaatctcctggcccagctcgccgccccagaccgcctggaagtggtcgtaaccgttgtagatgtacggcatgatgtcgatatttgccagatttgtgaagggagccagtgtgcccacggactcgcaggtgatgtccgctacgccggcagccatgccctccagcacctcagtggtggaacccaggctgttgccgccgtagaattcaatggagacgcggccggatgtgagctcctctaccttctccttgaagaacgtggccatatcatagcccagctcgccgggggcactgccgttcagcgccatgcgccaggtgtattccgcgccggtgccgtctccgccggaatcaccgcctccaccgccgcagcctgtcagcagggtaaacatcatcacaagtgccaataccattgccaacgtctttttcacatcaaacactcctttttcttttatcctgtcgattctctgcgaagggtcgcttgctgccgggacatgacagttgtgccgccggcctgacaacaaaatatgttgccttataaatgattttaccatttatatttcttgctttattttatagcactttacccaatgctcgtcaagcgttattaaaataacgagctattttgcacaatttttaacaatgtcgcgtgcggatatgtctcgccactcctgcaggcatcctacggactctcccttgattccggctttcgagtatgatatacttttcacaaaaagcaggaagggtaaggagaaccatgatggagcagccttcttccaaagccctcttcacgcctgccaagacccagcgggcgtccgaggctatttacaatcagatctaccccaagatcatttccggggaactgcgtccgggggaccggctcccgccggagcgggagctggcggagatgttccagcgcagccgccctgtggtgcgggaagcgctgcggatgctccagcaggagggactgatcgaaaccgccgtgggcagctccggcggcgcggtgatccggggcgtctccctgaaatccgtggaagagcccctgaaaaacctggtggccatgggggccatcaatctggatgagctgctggagtatcggcatatcaacgaccgcagctgcgcccgtctggctgccatccaccacacggaggaggatgctgaggcgctccggcagaccctggagggcgcgaaggccaacctggacagcctcttcagcttccaggagtatgatgtggcgttccacagcgctttggccaaggccagccacaacacgctggcctctctgattaatgacgtgattgtccgcctcaacacggatgtgtttgtggagacgattcgggattacacaccggagcagctgcgggagatcaatttgcggatctacaacacccattacgccatcatggaagccgtcctcgcccatgaccccgacggggcggaccgcgccgtggcggccatggtccggctgtttcaggatacggtccattgaacaggcacggagcttcacaagtacggcagcgcaccgcgaaaagaaacgctcgccgctgcgcatgagggggcgcattcggatcctgctgcctgggaagggcagggaaataccgttcacaaatttctgcgatgcagctgcgtcgcaaaaaagctggctgcccgtcgggcagccagcttttttgccatgatgttttggaaaggagttcccgcggttaggtgccgccccgcagggtgttctcctggatgaagcggatcagctcccaccccagcttgggcagatagcgcccctttttgagaaagaaccccacgtcgaacaccaccggctcctcgaaggggcggatcgccagcccttcgcagcccagggcctgctggccctgggccacgctgatgatgcccacgtaccggcaggagcggaccagattcgccatgcacagcacctggtcatagttgaagagaatgtccgggatcacctgatggcgctcaaactcccggctcatcaactccttcaccttggattgggcgtccatcataatgagcttctcctcccccagccgcgccaggggatccggtccagccgcgccaggggatggtccggatgcagcaccgcgtggatctccatagtgcccataggaatgatctccagctcctccgcctccggcgctgtggggaaggcgttataagccaggtccagcatttcacccgtcaccatctccacgtgcttgttcatggagccctcgttcaggtagatctgcgccttggggtgctcccgcagaaaggtggagaagatcatgggcacgatgggattcgtcagcacgtgggagattcccagccgcaggcgctgttccgccgtgccggccagatcccgcatggcattttccgccgcttcacaggtgctgaggatgcgccgcgcccagatcataaactgctcgccctcgtatgtaaaggtaacgcccttggagctgcggaccaccagccgcacccccagctcctcctccagcgcctggacggcggaggagatggccggctgggacacgtagagcgcctcgctggcctgggtgaaattcttatactggtagaccgcgtccagatattgcagccgcttcagattcagcatccggcagacctcccatccctccggcggcgcaccgccgcgcttttctttaagaataaaggagttttattgaaaaatcaagattttctttatgccaaaagtgcgaattgacatttttttgactagctgtttataagtttttgttattcctgcataaaaacatggtatttcactattgaattgccagttgctaaaattcaaattggaagacatattggggggcgcgggaaaggagggtacacggcaacgggcgccgctttcatcaaatctgacagagaaggacgggaggatatagacaacatgatcgtagtgagcgtgattggaatcattctggcattcgcggtgctgatctttgcggcttacaaaaaaatcagcatgttcctggcggcagtgctggctgcggccatcgtggccctgttcggcgggctggacgtggcggcctccctggtgggggcggacggccccttcctcatcggcatgaaggacttcgtgggcagctggctggtgatcttcgccctgggcgccctgctgggcgcgctgtatgacaagagcggcgccacctggcgcatcagcagcaccctcatcaacaaggccggaacccagtggacgctgctgatctacgtgctggtaggcgccttgttggtgtacggcggcatccaggtgaccgtgatgatcttcgtgctgctgccctttgccaagatcctgttccccaaggcgggcatcccatggtacttgttccccggcatcaccggcctggccatcgccacctttgccatgggccagatgcccggcagcctgcagatgcagaacatcattcccactcagattctgggcacggcgctgaccgccgccccggtggagggcgtgctggccacgctgttcatgatcgtcgtaggtgtcggctacctctactggcaggtgaagaagggtcataacgacccggaggcggccatcgagctctaccaggtccagggcggcattttggacgagaaagagctggagcagcgggctccgggcttctggatctccctgctgcccatggtggtgaccttcgtcctcatcaacggcttcggtgtggagctgctgtacggcctcacggccgggtgcgtgctgtccctcctgttcttctgcaaatccctgggcggcgtcaagggctttggagaaattgtctccgagggcttcaacaacgggatcttcccctgcatcatcatcgctgccgtggtgggcgtgggcaaggtggtctccgccaccgatgtgttcgccctggtgcaggagaacatcatcaacctgccgctgccgggcctggtgaaggtggcggccatcaccaccatcatcgccggaatcaccggctccgcctccggcggcctgactatcgcgctggagctcttcggtgagaccttcatctcctggggttacacgccggagatcatccaccgggtggcctccatcgcctgcggcggactggacaccctgccttggaacggcaccgtagtgatgctgttcgccctgtccggcgtgtcctataagaagggctacaagcacgtggcgatggagacggtcattctgccgctgctgtccctgatccctgtatttatctactattccatcgtacactgagaaaggtcgtgttgaatcgtggctacctatgaaaagagctttttgttgtccctgtaccgggacatggtccggatccgggcctttgaggaacacgccgccgagtgcttcaccaagggcatgctggcgggcaacatccacctgagcatcggtcaggaggcagcggaggccggtgccttcgcggccatcgagcccagggactacttcacctccacccaccggggccatggccatgccatcgcccgcggagcggaccccaagcgggccatggcggagctgttcggcaaggctgccggctactgcaagggcaagggcggctccatgcacattgcggacatggagaagatgaaccacctgggcgccaacggcatcgtgggcgccgggcagcccatctccgccggcagcgccctggcctccaagatcatgggggacgactccgtcaccgtgggctgcttcggcgatggctccaccaacgagggctccttccacgagtccctgaacatggccgccgcctggaagctgccgctggtctggttcattgaaaacaactgctacggcgtgtccacggagatccaccgggtcaccaacaccccggatctggcctcccgggccgcggcctacggcgtgccctacgccgtggtggacggcacggacgccatcgcggtgtatgaggctatgaaggtcgccctggaccacgcccgcagcggcaagggaccctatgtggtggaggccaaggtataccgctatcagggccactactgcggtgacccggcggtttaccgccccaaggagtacatggagcacgccctggcaaacgacggcatcgagaagctggggcggcggctgctggagagcggcgccgcccaggaggagctggacgccatccggcaggacgcagaggccgagatggacgaggctgtgaagttcgcggatgcgtccccatatccggaccccgcgacggtgctggatgatatgtatgtgactgacaacgaaaggtgcgtggcgagatgagcaagaagatcaccgtcagcaaggccatcggtgaagccttgcacgaggaaatgctccgggacgaaaaggttttcatcatgggcgaggacatggccgtcatgggcaatgtgttcgccatcaccaagggctttctggaggagttcggccccaaccgcgtcattgacactcccatctccgaggaggggtttgtgggcatggccgtgggcgccgcgatgcgggggctgcggcccgtggtggagctgatgtacgatgacttcgccacggagtgcgcggatcccctgttcaaccaggctgccaagatccgctacatgaccggcggacagtgcagcgtccccatggtcctgcgggcgcccatgggcgccggccgccggaacgcaggccagcattcccagtgcttggagaatttcttctgccacttcccgggactgaaggtggtggccccctgcaccgctgccgacgccaagggcctgctgaagtccgctatccgggacgacgacccggtagtgttcctggaacacaagctgctgtacgcccacaaggaggagatccccgatggggagtacaccatccccctgggtgcggcggacgtgaagcgggcgggcagggacctgaccatcatcacctggagccgtgaggtctacttcgccctggaggccgcccagaccctggaggcggagggcatcgacgtggaggtcctggatctgcggactctggtgcccctggactgggatgccatcgtgaagtccgtctccaagacccacaacgtcatcatcgtctccgaggaggtcaagcggggcagctacgccggtgagctctctgcccagatcgcagaggagctgtttgatgagctggacgccccggtggaacgggtctgcggcctgaacatctgctcccccttcagcccggtgctggaggacaagaacttcccccatccggaggatatcgtgcgggctgtcaagcgcgtgctgaacaagtgaggaggcgtgtgagatggcttatgaagtactgatgccccagctgggcctgaccatggaggagggaaccgtctcccagtggatcaagcacgagggagacgctgtaaaggccggggacgtggtggtggagatcaccactgataagctcaccaatgagatcaccagcgagcaggacggcgtcctgctgaagatcgtggcccaggagggcgaggatgtgccggtgaagggactgctggcctacatcggccagcccggcgaacaggtgggggagactactgcccccgctgtatccgcggcttctgctgccccgtctgcggagcctgcggctgcgctggcttctgcccctgcggcatccccggcggccgggggcaagcggatccgaatctctcccctggcccggaagatcgccggacagatgggcgtggactacaccgtcctcaccggcaccggccccagtggccggatcgtcaagcgggacatcctggccgcggcggaggccgcgcccaaggcagctgctcccgcccctgctgatcggaagatcgccgcgcctgcggctgtctccgccaccgccttcccggtgaagaatctggagctgatggagggtgacacggtggagaagctcaccggcatgaggaaggtggtggcccagcggatgtacacctctgctgtggagatccccaccgtcacccagacggtgaaggtggacgtcaccgccctgctggccttccgcaaaaagctgaaggaggagggccatgccttctctgtcaatgactttgtgctgaaggccgtggccaaggccctgcgccgtcatccggagatcctggtgagcttggacggggagcagatcatccgccgggcccatgtgaatctgggcatggcggtggctctggacgcggggctcatcgtccctgtgatccgggacgcggacctgctgagcctggaagccctgtccgccaaggccaaggatttggcggagcgggcccgtgccaaccagctgggcgctgacgagtacaagggctccaccttcactgtgtccaatctgggcatgttcggcgtggagagcttcacccccatcatcaaccagccggacgcggccattctgggcgtcaactgcacggaggatgagctggtgatggaggacgacggcaccatcgccaagcatcaggtgctgcggatctccctgaccttcgaccaccgactgctggacggcgcggtggcggccaaattcgagatgacagtccgggatctgctggagcatcccatggacatcctgctgtgaggagcgtaaacaatggcaacggaaatcaaaatgccccagctggggctgaccatggaggagggcaccgtggagcggtggctgaaggcggagggcgatcccgtcaaggccggtgagcccctgctggagattaccaccgacaagctgaccaacgaggtggcggcggaaaccgacggcgtcctgctgaagatcgtggcccaggagggcgccgacgtgccggtaaagggcctgctgggctacatcggccggcccggcgagcaggtgggggcccccaccgcagccgcggcacctgccgccccggctgtggaggccgcggctgcccccaacgggcctgggacggtgctggtcatcggcggcggccccggcggctatgtggccgccatccgggcggcccagctgggcgccagggtgaccctggtggagcgggagcacctgggcggcacctgcctgaacattggctgcatccctaccaagtgcctgctgcacagcgcagagctggtgtcccagatcaaggaccagggcgcggagatcggcgtggaggcggacggcgtccgggtgaacttcccccaggtgatcgcccacaagaacgccgtctccaaacagctgaccagtggcgtagcgggactgctgaaggccaacaaggtggtgaagatcgacggcgaggccagcttcaccggccccaagaccctctctgtgaagaagtccgacggctccgtggaggagatgaccgccgacgccatcatcgtggccaccggctccgtcaacgcccagccgcccatccccggtctgaaggagaatcccaactgcatcgactccaccggcgccctgagcttggaacagttgcccaagagcatggtggtcatcggtggcggcgtcatcggcctggagctggcctgcgcctacgcggccttcggcaccaagatcaccgtggtggaggcgctggaccacatgctgcctatgctggacggcgacctgaccaagatcggcgtggcccacatgaagaagatgggcatggcgttcaacctggagtgcccggtgcaggccgtggaggcctctcccgtgggcgccaaggtcacttgccggaacaaggctggcgagactgtcagctttgaggcggagaaggtcctggtggccatcggccggaaggccaacaccgccagcctgaacctggaggctgccggccttgccaacgaccggggccggatcatcgtcaacgacaagatggagaccagcgtgcccggcgtgtacgccatcggcgactgtgtcaagggctatgcccagctggcccacaccgccagcgccatgggcgaggtggctgcggagaatatctgcggcatggaggcccactacgacgaatccaccaatcccacctgcgtgtacatcgagccggaggctgcctctgtgggtctcacagaggagcaggccaaggcgcaggggatcgactacatggtgggcaagttccccatgagcgccaacggcaaggctctgatcctgaacgggggcgagggcctggtgaagatcatcgccgggagggaatacggcgaggtgctgggtatgcacatcattgggccccgcgccacggatctgatctgcgaaggggcgcttgccatcggcagcgagctgacgctggatgagctggcagccaccatccattcccaccccaccgtcaccgagaccatgcgggagtgtgcgctggacgcactgggccgcgcggtccacatcccgccccgcaggaaataacagggcagtcctttccggaatttagaacaggaggtcaatgggcatgaaaacacttggatatctgggccttggcgtgatgggctacggcatgacaggcaatctgatcgacaagagcggctgcgacatctatggctacgaccccgtgcccgctttgcgggagcggtttgccgcccggggcggtaaggtcctggacgacgctaaaacgctgtacaaaacctgcgacatcatcttcatgtgcctgcccaccaacgccatcgtgaaggccaccatcacggagatcatggagactgcccggcccggcaccaccattgtggacatgggctccacctctccctatgtgattcaggagctccacgccgcggcggtggagaagggcttctatctgctggactccccggtcagcggcggcgagaccggcgccaacggcggcaccctggtcatcatgtgcggcggcgagaaagaggtctttgacgaggtccggccctacctgctgatgatgggtaagaccgccacctacatggggccctccggctgcggcagcaccgccaaggtggccaacaacatgatggtgggcatccatctgtgcgccatgggagaggcattcgcctttgcgaaaaaggccgggctggatcctcagaccctttttgacgccatcaagggcggctttgcccagagcgcagtgatggacggaaaggtccccaagctcctgagccgagacttctccgccagtgcccggatcgccgtccacctgaaggacatcaacaacgccatggacgtggccgcccacctgggggtggagctgcccatgacggagatcgtcaaggagcagatggactggatggacgcccgcggcatgatcgacgaggaccagtgcgcactggccaaatactacgaggacgccatgggcgtggaaatcaagtgatctcccgccaaggaacaggcaatctgcggggaccggcatcagccggtccccgctggttttccctgtggtacagaatcatcggattttttgcgggatagctgcgggaaatcttgcaaagcggcacaaaatatggtacattgttcgagaatacacacggcgggagactcctcccgtccgtttttcgcggtctgaccgccccggattccgcatgcagctgtgcgccgtgggtcgaagatggcccatactctgatatttttctggaggatattccatgtctgaactacgcactgaaatttcccggcggaggaccctcgccatcatcgtcccacaaaagctggcgcttttgcgggagccctgatttgcgtttgctccgggcggagtgaatccgcccttcgccaaggttttgccttggcaaaacgcttggacggcgcaaaagcgccgtgggtcgaagatggcccatactctgatatttttctggaggatattccatgtctgaactacgcactgaaatttcccggcggaggaccttcgccatcatctcccatccggacgccggcaagaccacgctgacagagaagttcctgctgtacggcggggccatcgcccaggcgggcgaggttaagggaaagcgggcccgcgccgccacctctgactggatggagatcgagaagcagcggggcatctccgtcacgtcctccgtgctgcagttccagcacagcggcttctgcatcaacatcctggacacccctggccaccaggatttctccgaggacacctaccggaccctgatggccgcggactccgccgtcatggtcattgacggcgccaagggtgtggagccccagacccggaagctgtttagggtctgcgccatccgccacatccccatcttcaccttcatcaacaagatggaccgggagaccaaagaccccctggaactgtgcgaggaggtggagcgggagctgggcatcgacacctatgccgtcaactggcccatcggctccggcaaggagttccagggcgtctacgaccgggagaagcagcgcatcctgttcttccaggcggaggagcggggcaagaaggtcggctccgccgaggtggccctggacgacccggcgctggaggacatgatcggcgcacaaaaggccgccgccctccgggaggaggtggagctgctgggggccggacgggagtttgacatggaggctgtgcggaacggcaccctgtcccctgtgttcttcggctccgccctcaccaccttcggcgtggagccgttcctggaggagttcctccgcatgaccacgccgcccctgccccgtgtcagcgaccagggggaggtggatgtgttcagcgaggacttctccgccttcgtgttcaagatccaggccaatatgaacaaggcccaccgggaccggctggccttcatgcgcatctgctccggcaagtttgagcgggacacggagtattttcatgtccagggcaacaaaaagctgcgcctctcacagccccagcagatgatggccgcggagcgggagatcatcgacgaggcctacgccggggacatcatcggtgtgtttgaccccggcatcttctccatcggcgacacggtgacggtgcctggaaagaaattcaagttctccggcatccccaccttcgagccggagcacttcatgcgggtgtctcccaaggacaccatgaagcgcaagcagttcatcaagggcacggagcagatcgcccaggagggcgccatccagattttcaagctgcccggcgccggcctggaggaggtcatcgtgggcgtcgtgggcaccctgcagttcgacgtgttccagtaccggatgaggagcgagtacggcgtagagctctacatggagggactgccctacgagcacctgcgggtcatcaccgcctgcccctgcaagccggaggatctggtgctgtgcaccggcgccgccctgctggaggacttcaagggccgcctgctggtggcattcggcggggagtggtccgtgggctttctcaccaagcacaaccccggcctggagctggccgagtccctgtctgtctgagcctgaaaccgtccgccggaaagaggcggacggttttttgcttttctttcttccggctgtcaccttttcggcggaaaccgcatcctaataagtgaccggtcaaacgaacccaaaggagcgctcagtcccgccatgacaaattttttgttggacaaagaaatattctgcgaccaggtaatccgaaaccaggagaccatgttccgcactgccaaggctatccttcaccaggacgaagatgcggaggacgccgtgcaggaggccatctgcgccgcctatgccggccgcggcagcctgcgggacccggcgcggttccgaccctggatcctgaaaattctggtcaacaagtgctatgagttctgccggaagcggaggaccacggtggacctggcggatatccaggacttcctgccggctccggcggcagaccaggcggagcgcctgtctctatggcaggcggtcatggcgctgaacagcgacctgcgggcggtcgtgaccctgttttattatgaggacctctccatccgggagatcagcgccgttctgggcatcagcgaggcggcggtgaagacccgtctctcccgagggcggtcccggctaaaacaactattacacgaggaatgaggtgcgcaaggtggagccattcgacaagcgactgaaagagcgggcgaagcaggaacccttccccctgccggagacgtatgccggaaaggtgcgggacacctgcgccgctttaaaggagacgaacatgaaagaaaacaagcaaaaacgttcctatcgctggctggtcggcgtagccgcggccctggccgtattcgtggccattcccaatgtatctcccgcggcggctgccgccatggaagaaatcccggtgctgggcgccgtggtgcgggtcatcaccttccgggattaccagtatgacgatggtcacagcactgccgacgtccacgtcccggagctgggcggtagcggcgctgcagacgagatcaacgaccaggtgcaggcctataccgatcagctgatcgcccagttccagacggactgcgaggctgcgggcgagagctaccagggcctggatgtgacctcctctgtggtgacggacagcgatacttggttcactctgcggatcgatgccacgaggaccgaggccagcggctacaatttcacccgattctaccacatcaacaaagctacgggtgaagccgtcaccctcagcgatctgttccggcctgatgcggactacgtctctgtcctgtccgcggaagtcctgcggcagatggaggagcagatggccgcggacgtatccctgagctatctgacggacgaattcaccgctattgacccggagcagagcttttactggaacgccgacggcgatctggttctggtgttcgacgagtacgcggtggctgcaggctacatgggcatggtggagttcaccatccctcaggatgtgtacagcgccctgctgaagtgaccgcgctcccccataaacctttatacgcattgggcgcatcgtagataagggcaaatgctgtggtgaaaggtttggcgcatcgtttccagttgccccaaaggagcggggaaagatgcattcagttttctgcggtgcttttatataacagagaacagcggaccgcttcagcggtccgctgttgttttcccggtttactgggcttgctccatccgccagacgatggcggagatctggccccgggtcagagtgttgtagggcttgaaggtgctggtgccgttgctgaagtagccctccacgatgcctgcggcattcagcgcctggacataggggtccgtggtgtcggtgaagggacggacgctggacaggttgctgatgctgaggcccatggccttggccgcgatctggctgaccgccagccgggtgatgggggcgttcaggttcacgctgccggacaccagcccgtccgcctgcgcccgggccagatagccgctgaacacgttggagttcaccggcttctgctcgtcatagccagcggccagcatgatgagcttcagcgccgcgccgtaggtcacctggttgtcgggcttgaaggtgccgtcgctgtatccgtcgatcacgtcggcgtcgctgagctccagtacatatttatagcaccaggtggaggaggtgatatcagagaagtcctccatagcgctgacaatgcccaggcaaagcttgccgctggcaatgggatcgccgctgctgttgcaggccacataggggatttccacagatccggtgaagccgctggccggcacgaaccgcagctggctgatccgctcgctgccgctggagtagccgtacagggtctcggtgtccgcccgcttggaggtgccgctgcccacgtagatgacaccctcgttggtggcgggcagttccagcagctggatgctggccagacccaggccgctggactgggccaccgccgtgtagatggaggcggcggggaaggtgacggccgtgtttctgggcgtggggccgtaaacgtcgggcacctcgctgaggttcacgctgatgaggatggtgccggacacagaacggctgccggagccgtaagcggtgaaggggatctgggcgcagtagttgacgccgctgggtatgtatgtcagctcgctgagggcgtgctggctgctggagggactgaagtagaaatctatgtcgtcgcagttgtcgtcggtgatgcgcaggctgctggagctgccgtagctgctggtaccgtagtagttgtagtacaggctgccgtaagtgggcgcatctttaaaggtgacatactgcagggtatagccggggtagctctcctcaaagaaccgggcgatgtcgttggcgttgatctgcactcggccgctgtaatccgtataatagcggatatcgccgccctctgcggccacgccggttccccccacatcgccgatggcgatggccacggtgccgtaggccttgtcgccgtcctcaccgtaggcagtgaagtccagctccaccaccttgccgtcggcgtccctgtccgccacaaaggtcaggtcatccagggtgaagtcctcgtcgtagaacaggtccttgctgtcatagtagaaataaccgtcgtccaggtcgctctcgtcaaagtacgtccggtcatcatcgtagtcgtagctgtacagctcgccccagtcgtccagtccgtcggcgtcggtgaaccgtacatactccagatcgtccccggtctcgtcatccaggaaatcccagaagtcgtcccggtcaaaggtcacgctgtcgtcgggatccacctcgtaaatgatgtcgcccttcaccttggtgccggtgctgctgcccttgccgatctcaatggtgagggtagcggagatcttgtcgcctttcacgccgcgcatggtgacgtcaaaggtcagggtgtcttcatcggcattccggtccgccgcaaaggtcagcgtgtccagctcgaagtcatagtcgtcccagatatcgtcctcatcatagtaaaacacggcgtcgtccaggtcactgtcgttcagctcgtaatcccgggtgtagtcgtcggaatcgtatccgtcggcgtagaaacagccgtaatcgtcaaagtcgtcatagtcggtgaactccacgtattccagttcgtcgtaatccgactcgtcgtagaagaaatcgtagaaatcctccgcgtccagcgtcacatcgtcgtccgggtccacctgataggtcaggtcgcccttgctactggtgccgctgcccttgccgacctcgatgtacagagtgccatataccttgtcaccgtccacgccgtgcatggtgaagtcaaaggccagggtgtccgcgtcggcgttccggtcggcgtagaacgtcagcgtgtccagttcaaagtcatagtcgtaccagacgtcgttctcgtcgtaatagaacatggcatcgtccagatcgctgtcattgagctcatagtccaggatatagtcatcgctgtcgtatccgtctgcgccgaaatatccgaagtcatcgaaatcatcgtagctggtgaactccacatactccagctcgtcatagcggccgtcttcctcgtcaaagagatcccagaagtcctcggcgtccaccgtcacatcgtcgccggggtccaccttgtaggtcagctccacgtcgccggagccggagcgggagccaccctccacatcaatgcggaccgttgcatagaatgacccttcgtcgccgtacagcctgacatcaaaatccagtgtgtcgctgtcgatgttgtcataggtctcaaaccgcagcgtgtccaggtcgatgtcgtaatcgtccgcatcagcacggtcatagtagaattcgtagttctccagcgccttggaatccacgtcgtcgaacccgtaacggtcaaagtcctcgaaggtgaaatagccgtaatcgtcaaagtcatcataatcggtgaattccacgtattcaaggtatccgccgttgtcgtcctcatagatttcctgaaagtcatccgcatccagccagacgccgctgtcctcgtccacatcgtacgtcagatccgccgaggccgcagacgccatgggaacggttccggccagcagcgccagcgccagcagacacgccgggagctttttcttccaaaatgttttcatagtcctctttcctccatcatattccaaaaggcttgcttccagcttctatctctctacatgtaacataccgggaaagtgcccggcaatcatgaacaaattatgaacttttcgccattcgggaaaaaagattccggtccggccgcatcctggaaaacgaaattgtcccctgaaatacacagacggcccgggattttccgtttttttacgggtttttctttacaaacaaacgttcctccgatataatactatggctaatgaaatttgaggaagtggagagagcacatggctttgatcgaatacgacgaatataagcagaggctccgggacctggggcccgagctggagaagctctccgccgcgctggacatggacagcgcccgcgcggaggcccgaaagctggaggacgagactgcccaggacggcttctggaacgacctggagcgatcccagaaggtgcagcagcgcctcaagcagctgcagaacaagatcgcccgccaggacaagctggtgaccgagtggcaggatctgacggccctgtgcgagatgggccaggaggcggaggatgaggagctgctggaagagctgaagtccggtttccagaccctggaggagaagatcgaggagtcccggatggccacgctcctctctggggagtacgacggccacagcgccatcctgaccttccatgccggcgccggcggcaccgaggcccaggactgggcccagatgctctatcggatgtacacccgctggacggagcgccacgacttcacctatcagatcctggactatgaggacggcgacgaggcgggcatcaaatccgcgtccatcgccatccagggggacaacgcctacggccttttgaagagtgagaacggcgtccaccggctggtccgggtgtctccctttgatgccaacgcccgccggcagaccagctttgccgcggtggaggtcatgcccgagatcgaggatgacgacgaggtggagatccgggaggaggacattgagatgcaggtctaccgggccagcggcgccggcggccagcacgtgaacaagacctcatccgccgtgcgcctcattcacaagcccacgggcatcgtggtggccagccagcaggagcgcagccagtttcagaacaaggacaactgcatgaagatgctgcgggccaagctggtggagctgaagcagcagcagcacgcggagaagatctccgatatcaagggcgtgcagatgaagatcgagtggggcagccagatccgctcctacgtgttcatgccctaccagatggtgaaggacacccgcaccggctatgagaccggcaacatcgacaacgtcatggacggcgatctggacggcttcatcaacgcgtatctcactcagctggccaccggtgagctgaaaaaataaatcgtccacgcatccttccggatgcccggctttccggagccgcaacctaatagagaaatcaaaatatgagacgtggcgcggggtggtctccgtgtcacgtctctctgaatgagaaaggatgttggaatttccatggcagaaaaattcccccagggcgcggcgccccaggagaacaagatgggcgtgctgcccatcggacggctgctgaccaacatggcggtccccatgatgatctccatgctggtccaggcctgctacaatgtggtggacagcgtgttcgtggcacagatcagcgaggatgccctgaatgccgtgtccctggccttccccctgcagaacctgatgatcgccttcggcgcaggcaccgctgtgggcatcaacgcgctcctctcccggtccctgggagagaagaatcaggccatggcggaccgggctgccaacacgggcatctttctggccctgtgcaatttcgcgctattcgccctgatcggcatcttcttctcccggaccttctttgagctgcaggccgggggagaacaggtgattatcgactacggcgtggattacgcctccatctgcctgggctgctccatcggtattttcagccagttctgctttgagcggttgctgcagtccaccggccgcacgttcctggccatgtgcacccagcttaccggcgccctcatcaacatcgtgctggaccccatcctgatcttcggctggttcggcctgccccggatggaggtggccggcgccgccattgccacggtggcagggcagattgtggctgccgccgctgccctggtgctgaacctcaaatgcaatccggacatccacatcctgccccgggagatccgctggcacggcaaggtggcggcggagatctaccgggtgggcttcccctccatcgtcatgcagtccatcggctccgccatggtgttcggcatgaacaagatcctcttctccttcaccaagacggccaccgccgtgttcggcgcatacttcaagcttcagagcttcgtcttcatgccggtgttcggcctgaacaacggcatggtgcccatcgtcagctataactacggcgccgccagcctgccccgggtgaagcggaccatcaagctgaccatctgcaccgccatggccatcatggctgtgggatgcctgattttccagctcttcccccagcagctgctgatgttcttcaacgcctcggaggagatgctctccatcggctccgtggctctgcggatcatctccgtgtccttcgtgctggcgggcttcgacatcattgccggttccgtgtgtcaggctatcggcaacccgctgtacagtctgattacctctgtgtgccgccagctggtggtgctgctgccggtggcatggctgttgtcccacaccggcgtcctgacgctggtgtggctggccttccccatctccgaactggtgtccctggtactgagcgctatcttcctgcgccggaccatgcgggccgttgccgagcggatcggcagccgggcggcctgactccagagaaaagcagcggcggaacggcctttgccgttccgccgctgctgcgtcagctgttgagaaatgcgtccgggtccacagcttccccatcctttgcaacggagaagtgcaggtgggcgccctgggcggcctccgccgcggcggtggttcccactgcgccgatggtctgcccggcggacaccgtgtcgcccgtctccacggcgggctccgcctggagattggcataggtggtctcatagccgccgctgtgctggatcaccacggtggtgcccatcaggggatcgtcggtgatggaggagaccgtcccggcgcaggcggccaggacggcatcgccttccgccgcggcgatatccaccccgtcgtgggtccgccagtcgtccagcgtctcattgtacagcagctggtccacggagaatgccgtcagcacctctccctggatgggcaggaccaccacatggggctcctctgccaccacgggcgtgtcatccaccgggatggtcacctccggcatgacgacgggctccgtctcctcctccggttcctccggaggcacggtctccaccaccggttcgtgctccggcaggtcctccaccggtgcggaggctgccgtgtccgggccggtgggcgcttccgtctgggccggttccccaaacagcagaaagtagccgcccacgcccaccgccaggacgcacagggccaggaccgcgtaaaagcctggcccgcccagcagggatttgactttatttgccatgtatcatacctccctcgatcttgggtctgagggaagtatgggcaggatttccaggaattatacaaaaagagaccgctggaaagcggtctcttttctctcagaaattggtcacttcacgatcagcgtcttgccgtccatctcctctggacaggccaggcccatcacgtccagcatggtgggggcaatgtccgccaagcggccgttggggcgcagctcggtccccgcgccgcagagaatgaaaggtacgggattggtggtatgggcggtcatagggctgccatccggctccgccatctgctcggcgttgccgtggtcggcggtgatcatggcgatgccgcccatcttcagtgtggcgtccaccacccggcccacgcagctgtctacggtctccacggccttcaccgccgcgtcatagacgccggtgtggcccaccatgtcgcagttggcaaagttcagaatgatcacgtcataggcgccggactcaatgcgctccacgcacttgtccgtcacctccgccgcgctcatctccggctgcttgtcgtaggtggccaccttgggggagggcaccagtacccggtcctcaccgggaaagacagtctcggacccgccgttgaagaagaaggtcacatgggcgtacttctccgtctccgcgatccgcagctgggtcatgcccatctggctgagatactcccccaggccattgcgcaccgtcacccggggaaggccacctccacattgggcatggaggcgtcgtactctgtgttgcacacgaaggtcacggggaaaaactggcgggtgaagccgtcgaactccgggtccaccagggtccgggtgatctcccgggcccggtcgggccggaagttgaagaagatcacgctgtcattgtcggagatggtgccctcggcatcacagaccacgggttccacgaattcgtcggtgacgccccggtcataggactcccgtaccgcggccaccgggtctggattctgcacggcgccctcgccgtacaccatggcgtcgtaagccgcctccacccggtcccagcgcttgtcccggtccatggcatagtaccggcccatgaccgtggcgatcttgcccacgccgatctcccggcactgtgccacggtctgcgccacaaagtctgcgccggaggtgggggatacgtcccgcccatccagaaaggcgtggagatacacatgctccaggccccttcgcttcgccagccgcagcagggcgaacaggtgctccaggtgggagtggacgccgccgtcggacagcaggcccatcaggtgcagggacgtgcccttctccaggcaggcgtccatggcgtgccggtaggcgggattttcatcaaagctcccgtcggcaatggctttggtgatccggggcaggtcctggaacaccacccggccggcgccgatgttggtgtggcccacctcgctgttgcccatctgcccgtccggcaggcccacgtccaggccggaggcccggagcgtggtgtgggcatactcccggaaaaactggtccagccggggcgtggcggcggcgcggatggcgttgccctccgtctcctgccgcaggccgaagccgtccatgatgatgagggttgttggtgttttgttcattgaaatctcgtctcgctcgctttctcacaaaaccgctctgccggagctcactcctggttggctgcgttgatgatgtccacgaactggtcgggcttcagggcggcaccgccgatcaggccgccgtcgatgtccggctgggccagcagctccgccgcgttcttggggttcatggagccgccgtactggatggtgacgctgcgggccacccgggcgccgtacaggctgcggatggtggcacggatgttggtgcagacctcgccggcctgctcggcagttgcggtcttgccggtaccgatggcccagatgggctcataggcgatgatgcagcggcgcagcttgtcggcgggcacgccgtacagggcgctcttcacctgaagggcaatccactcgtcggtgatgccggtctcccgctgctccaggctctcgcccacgcagatgatggggttcatgccggcgttcagcacggcgtggaccttcttgttgacggtggtatcggtctcgcagaaatactgccgccgctcgctgtggcccacgatgacgtacttcacgcccagatccttcagcatgtcggcggagatctcgccggtgtaagcgcccttctcctcaaagtacacgttctcggcgcccacggagatccgcaggtccttgaacgccttggcggcggtctgaatgttgcaggcagggacacagatcagggtgtcgcaccacttggcccggggcatgatcttcttcagttcctcggcgaatttcttcgtctcagtggcggtcatgttcattttccagtttccggcgataaccgttttgcgatatctgcgattcatggtgatctcttctcctttatgtcttcatctatccgcaatcgcgttctccgcgatctgatgcgcaggttttggccgtttccagggcattttccccgaaaggcccttttttttatacagaattccagcccgtttgtcaagtcaaatgaagcgcgtttggggacggattcggcgcggccgccgcaagcggccgcaacattcaaattcattttcgcctcagggcgtgcgtggcgaaaatactttgcctcagccgccctgggcggtgtcaccagtccgcagattggtgaggaggaatgtaaaggggggacacagtccccctctttaagcatccgggaggcaggccacgcggggcagctctttgccctccaaaaattccagcggcgcgattgacggctccgggaggaaccgggaaacgcaatgccgcaacggtggatcggcggcacagcagcttactgatcaaggaggcaggccacgccgggcagttccttaccctccaggaattccagggaggccccgccgccggtggagatgtgggtcatcttgtcggcgtagcccagctgctccacagccgccgcgctgtcgccgccgccgatgatggtgatggcgtccgtacggctcagggcctcggccacagcctcagtgcccttggcgaaggccgggaactcaaagacgcccatggggccgttccagatgacggtgcccgcgtccgccacggcgccgcagtacagcttcaccgtctccggaccgatatccaggccctgccagccgtcggggatctccccggccttcaccacctgactcttggcgtcgggggcgaaggcgtccgcgcagacggtgtccaccggcagcagcagctttacgcccttctcctttgccttctccaccatctcattggcgtagctctcccagtcggcctccagcaggctgtcgcccaccttgccgccctgggcggcggagaacgtataggccatgccgccgccgatgatgatggtatcggcgatgttcagcaggttgttgatgacgccgatcttggaggagaccttgctgccgcctaagatggccaccaggggccgcttgggatcggcgatggcaccgcccaggaactccagctccttctggatcaggaagccggagacggcgggcaggtacgccgccacgccggcggtggaggcgtgggcccggtgcacggcaccgaaggcgtcggacacatacagatccgccatgtcggccagcttcctggccaactccgggtcgttcttggtctcgccgggctcgaagcgggtgttctccagcagcaggatctgtcccggctgcagggcggccgccttggtttgggcgtcggggcccactacgtcatgggcgaagatcacttcccggcccagcagctcgctgaggcgcttcgccaccggggctaggctcagcttggggtcggggccgttcttgggcttgcccaggtgggagcaggcgatgaccgccgccccattctccagcagatactggatggtgggcagcgccgccacgatgcgcttgtcgctggtgatggcgccggtctctttgtcctgggggacgttgaagtcgcagcggagcaggacctttttgccccgtacctccacatcccggaccgtctttttatgggtattcatctgagatgtcctcctatctgatctcgttccattggattcctcatgattcattccaacgcagccgaagccgcagaggcgttcggcggcggtgtcagcgcgttcagggactagtatggaccgaaggatggaaattcacccccggccgccccccctgcaatgcaaggccgctccgcgccctgcaaaagcagccgggcctccccagcggaatcggcgccgcccggcggggctcagccccaggccatctcgccggttcccagcaggcccggaaacccgttctgccgcagcgcctcgtagacgcagacggccacggtgttgctcaggttcaggctgcgggcctcgctgaccatgggcaggcggacgcagcggtcccggtaccgctcccggagagccagaggcagtccggcggtctccttgccgaagaacagccagctgtcggcggtgaaccgggcctcctgataggaccggggcgccttggtggtggtgagccacaggtcccgctccgcctcggggcggcggcggaaaaagtcctccagattctcgtaatcaaaaacctccaccaggttccagtagtccaggccagcgcggcggacggccttctccgagatgtcgaagcccagggggcggatcaggtgcagctggctgccggtggcggcgcaggtgcgggcgacattgccgcagttctgtgggatctccggctccaccagtacgatatgaagcatagacagctgtccccctcttttcatgcagtcaaaacacattgtaccgcgtcgccccggcaaattcaactgtaatgtgtgaagaaaaccggatttttagaaaaaatcacgacaaatccggctggatttctgcaaaatgccggaaatgacagaaggagggggcgccgcaggagcggatctgttgtctcccacaaaaaaacgtccctgtacaagaaaaatctggaggaaatttcttttataaattcgccggaaatactggattttcccaagatatttgttataataaaaaatacgaacgaacaaggaggagaaaacccatggattttccgcagcgcgccgtgttttttctggaagaggactcctccctcccggcgcactccaaaccgctgatgctggaagccgtgttattttgcccgatcctaaaatggatgagtgacaagctgttggccgacggcgtgcagcggttttttgctgtctccagcccccgctttgcccaggaggtccgcgcctgcttcccggaggacgcagacgtgaccatctctgagcagcacagcgagctgctggactttttgaacacgccggacccggtggccgtgtttgtccgggccgcccttcccatggaggaggcgggccccggctttgtctacggcgccgccggctacgagctccaggcggtctggcaggagaagatgaccaatgccgtctccgcggcggagctgatccccggctgggtgccggttttcagtctggagaccgtggccgagctggagcccctgctccgggagcggatcgtccggcggcacatccgcgccggcgtccgggtgctggacccgaacgcggtgtatatcgacccccgggtcaccatcggccgggggaccatgctcctgcccggcaccatcctgcggggggagaccgccgtcggctgcggctgcaccatcggtcccaatgccgtggtgcgggattgcgtcatcggcgatgagacagagatcaatgcctcccaggtgaacgagagcaccatcggcagccgcacccacgtggggccctttgcctacgtgcgccccggctgcgccatcggggatgacatcaaggtgggcgactttgtggaggtgaagaactccgccatcggtgacggcaccaaaatctcccacctgacctatgtgggggacagcgacgtgggccgcaaggtcaacttcggctgcggcaccgtcaccaccaactatgacggcgtgaagaagtaccgctgcaccattgaggacggcgccttcatcggctgcaacaccaatctggtggcgccggtgactgtgggcgcgggttcctatatcgcggcgggtgccaccatcaccaaggatgtgcccgcggacgcgctggccgtggccagggccaagcaggagaacaaggaggggtgggccaaacggcggcggaagctgtacgggcaggagcactgatgctccttcggctgatcgatcctactgacagaaaccaagaacattcagaacatagaaagagggcgttcaaacaatgatttctcacggcaaggacatcaaggtgttttccggcaacgcgaatccgaagctggcggaggagatctgcaagttgatgggaaccaaactgggcgaggcggaggtcggtaccttctccgacggggagatcttcgtctccctgtacgagacggtccgcggcagcgacgtgttcgtggtccagtccacctgcaccccggtgaacaacaatctcatggagctgctcatcatgatcgacgcactgaagcgcgcctccgccggccgcatcaccgcggtcatcccctactacggctatgcccggcaggaccgcaaggccaaggcccgtgaccccatcaccgccaagctggtggccaacatgctcaccgccgcgggcgcggaccgggtgctgaccatggacctgcacgcctcccagatccagggcttcttcgacattcctgtggacaatctggcgggcaaccccatctttgtggactactacgccaagaagtacggctccgagtgcgagaacatgatggtggtctctcccgacgtgggctctgtgtcccgggcccgggcctttgcccagaagctgcacatgaatctggccatcgtggacaagcgccggcagaaggccaacagctgcgaggtcatgaacgtcatcggcgacgtgcgggacaaggactgcatcctcttcgacgacatggtggacaccggcggcagcctgtgcaacgccgccaaggccctgatcgaggtgggcggcgccaagagcgtccaggcctgcgcctcccacggcgtgctctccggcccggccattgaccggatcaacgacagcgtcatcaccgagctggccctgctggacaccatccccgccattgatcccaaaaagagcagcaagatcaaatacctgcaggtggcccccatgtttgcagaggccatcgagcgtatctaccaggagatctccatctccaagctgttccgctgagaagcggcggagctccggcatttctgcgtatcaataatggactggtcaaggcggggaagggaactttcccgccttggctgacgttgcaaaggagtttttttcatgctgttaggcgccaaatccgccgccgtggactggctggtggtgggcctgggaaatcccggggccaagtatgagcacacccgccacaacatgggctttctcaccgtggacctgctggcggagcaggcgggggtgaagctgaacaaggtcaagttcaaatccgcctataacatcatccccttcgccgggtccaagtgcctggtgatgaagccccagacgtatatgaacctctccggcgaggcggtgcgggaggcagtgcagttctacaagatccctgccgaccacgtgctggtgatctatgacgatgtgtcattgccggtggggaagctgcgggtgcggcccaccggctccgctggggggcacaacggcatcaagaacatcattgcccacctggggacccaggacttcccccggatcaagatcggcaccggcgcgccgggcgaagggggcgacatgatcgactgggtcatcggcgtgccctcccaggcggagcggaaggtgttggtggagagcttccgccgggccatcgacgcggcggaatgtatcattgaacatggctgtcagaaggccatgaatgacttcaattgaatgagggccgtccaatagggcggctcgccgcgcctctttttgccgccgggcatggcgcccggtaaaggggaatacactaaggacggatccattttcccggatcgtgccggtggatatgacctgggtgggagaatcatgtccatccgctttacagcccctgcctccaaacaggcgccgggcggagaacgcccaccgggccatgcgcccggaagcggcccggcgcccagagagtcttcccaatttttcatgttgacaaggaccacatcctatggaacagtttctgagacaattgcagactatccccgaggcggcggagctgatccgccgggtggaggagggcggctgtcccgcggcggtcagcggcctccagccggtgcagcgggcctgcgtgggcgcggcggtggcggcagcctgcggccgtccggcggtgttcctctgcggggacgagcgggaggtccaggtcctctccgctgatctggagaccctgacgggccgccgccccgtgaccctgcttggccgggagtggcagttccgccccggggccgtgggttctcgggactgggagcggagccgtctggcggcgctgtacgccctggcccagggggacgcgccggtggtggtggccaccgcggacggcctcatggcccggaccctgccgccggagaccctgcggtccctggccatcaccctggaggtgggggggcaggcagagctgggcgcgctggcggagcaactgctctccgccgggtatacccggtgcgagcaggtggagggcgtgggccagttcgccctgcggggcggcattctggacgtgttctctcccctgatggaccagccggtgcggtgcgagttttttgacgatgagatcgactccatgggcgccttcgaccccggcacccagcggcggacccggaacgtgtcctccgcccggatcctgccggcggcggaggtgctgccccactgcgcccccggaggcctgcccggtcttgcggaccagctgaccgccctggcggagaagctggcgaaaaagcagaagacggaggccatcgtccagacgttgcgggaggacgcggagcggctgcgcagcggcgcggccccgggggcggcggaccggtatctggcagccatctatccgactgtcaccgccggggtccactacctgcctccggacgcggtggtgttcctcagtgagagcggccgggtggacgagcgggtgaagaacacggtcctccagcagaagcaggacgtggaggcgctgctgtccgccggggtgctggcgggggagtacgcccatctgaccctcaccgccgaggaactgtacgccgcgctggaggacttccccgtgatcctggaggactctctgcccacctcccggcaccccctgcggccccggggcctcctgaccatgaatgccaaacagctcagctcctacggcggcagcctggagaccgccgtcacggatctggagcactaccgctcctccggcagcgcggtgctggtgctctgcggtggggagacccgggcgaagaatctccaccggctgctggaggagaagggcatcccggccaccctggatctaagcggcgccgccatgcctgcggcgggggaggtgcgcctctccctgggggccctgtccgctggcagcgagtggccggcgctgaagctggcggtgctgacagagggccagctgacggccccggccatgcgcaagcgccagcgggtgaagaaggactccaaccggcagaagctccagtcctacaccgacctgtcccccggagacctggtggtccatgagcaccacggcgtgggccggttcgtgggcatccagcggatgccggtggacggcgtggagaaggactacatcaagatcgactacgccggcggggactgcctgtacgtccccgtgacccagctggatctggtgagcaagtacatcggcggaggcgaggacaccgagcgcaccaagctcaataagctggggggcgccgagtggacccggcagaaaaccaaggccaagaaggccgccaaggatctggccaggggcctcatcgcgctgtatgccgagcggcagaagcggccgggcttcgccttctccccggactccccctggcagcgggaatttgaggagtcctttgactacaccgaaaccgacgaccagctgcggtgcatcgcggagatcaaggcggacatggagaagccacggcctatggaccggctgctatgcggcgacgtgggctacggcaagacggaggtggcactccgggccgtgatgaagtgcatcctggacgggaaacaggccgccatcctggtgcctaccaccgtcctggcccagcagcattacgccaccgctgtcagccggttccgggactttccggtgaagatcgaggtgctgtcccgcttcacccccgccagggagcagaagcggatcctggaggccgccaaaaacggcggcgtggacctgctgatcggcacgcacaagctgctgcagaagagcatggcgttcaaagacctgggcctgctggtgatcgacgaggaacagcggttcggcgtcacccacaaggagcggctgaaggagatgagccgccaggtggacgtgctgaccctctccgccactccgatcccccggacgctgaacatggcactttcgggcctgcgggacatgtccaccctggaggagcccccggcggaccggcagccggtgcagacctatgtgctggagcacgactgggccatcattgaggatgccgtccgccgggagctgggccggggcggccaggtatactacctccacaaccgggtggagagcatcgacgccaccgccgcccggctccagaagatgctggggccggaggtccgtatcgtcaccggccacgggaagatgacggagcaggagctgtcctccgtcatgcaggccatggtggacggggaggcggacatcctggtctgcaccaccatcatcgagaccggcatcgacatccccaacgtgaacacgctcatcatcgaggacgcggacaagatggggctggcccagctccaccagatccggggccgcatcggccgcagcgcccggcgggcctacgcctatctcacctaccgccggggcaaggtgctgcaggagaccgccgccaagcggttggcggccatccgggagtatgtggagttcggctctggcttcaagatcgccatgcgggacctggagatccggggcgcggggaacctgctggggccggagcagtctgggtatctcatgagcgtaggctacgacctgtacctgaagctgctggaggaggccgtcctggaggagcgtggcgaggagaagcggatcgagacggagtgtgccgccgacctgacggtgaacgcccatatcccggaccggtacgtcccctcggcggaacagcggatggacctgtaccgccgcatcgccgccatccgcacggacgaggacgcctcggatctgctggacgagatgctggaccgctacggcgaggcgcccaagtccgttctggccctgctggacgtggccctgctgcgttctgccgcggccaaggccggcgtgtccgatatctcccagaagggcagcctcctgcggctgcagctgggagtgttccacccacaggccctggtggcggtgtgcggccacgccaagtaccgccagcggctgacgctggcggcgggggagatccctgccctcaccctgaagctcaagcccggggaggatgtgctggaggccgcccgggacctggtggaggacctgaagctggccgcggaggaggccgcgggcgggaccccgtaagtttcatcatgtttttgccatgccccgcataggatggtggcggtgggacgtcccccgcctgtcctgtgcggggcgtttccacggaatctgcgaggaatgacaaaggagaaccgtgatgaaacgatgcatcgctttttgcctggccctgggggccgccatctctctcaccgcctgcgggggcggagacacagaggggggacttctctgcgaggcgtccggcatccgtccggacactgtgctgctgtccgtggacgggcgggacgtgtccgcccagcgatacctctactggctggcctacgcctgcgactacattgccgactactacgacagcggggaggggatccagtggggggacactgtctccggccagagcctggaggattacgccaaggaccaggcgctgcagaacgccgccctgtacgccacagtggagacctgggcggaggattacggctgcaccctcaccgacgaggaccggactgccatggaccgggagtgggcggcccgggcggcccagtacggcggggaggaggcctatctggccgtgctggcccgcatggggctggaccgggcggaagcggaggccatctccggggactactatctctacgagcacctgtacgacctctactgcacggagggcagcgagctggcccccgcggagcatgacctggagacctttgcccaggagcagggctacctcaccgtggaccacatctggctctccaccgccgccgcggacccggcggacgcggaggccgtggccgcctgccgggccagggcggaggaggccttttccaagctgaacggcagcgcggaccctgcccatgactttgctgtcctggccgccacttacagcgatgagacggaccgggaccagcatccgtccggatacaccttcactgtgggggacggcacgctgcccgccgcctgcgaggaggcggcccaggccctggaggagggccagttcagcggcgtggtggaggcggatgacggcttctacctgattctgcgcaagcacgtggacctggaggccgtggccccggactacttcgacgccctgctccaggctgcggcggacagcgcggacatctccaccacccgcacctatgcggacctggatgtgagccggttttacgacgagctcatcgccgcccgggcggagctggatgcctccggcggagaggttgcctgatgggtgtttgtgccaattttggcaaaatgacgaaattcgcagaggttttgataaagttttaacaaattttcgaatttcacagaaatttgcattgacggggcaggaaaaacccagtataatcaaatcagcaagcggttggtgtatgagcatttgtcaaaaatttggcaatcatgtttttcttttgacaaactctcgccgccaccctcaacttgtgattggcgtctgcggcagcgcctgacgaagagccgtcggagctgccaatcccatatttttataaaaacggaggaagatcatgaaagagctctatgttgtgaattgctgcagaaccgcgattggttccttcggcggcgcgctgaagaacacccctgccgtcgatctgggtgccatcgtcatcaaagaggctctgaaccgtgccggcgtgaagcccgagcaggtggatgaggtcatgtttggctgcatcctgaccgccgcccagggccagaacgtggcccgccaggcctccatcaaggccggcatcccctattccgtccccgcttacaccgtgggcatggtctgcggctccggcatgaagtccatgatcgagggcgcccgctccatcctggccggcgacgccgacgtggttgtctgcggcggcactgagaacatgagcgccgctccctacgccgttcccaccggccgctacggcgcccggatgggtcacacccagatgatcgacaccatgatcaaggacggcctgtgggacgcctacaacaactatcacatgggcaccaccgctgagaacatcgcggacatctggggcatcacccgcaaggagatggacgagttcgccgcctcctcccagcagaagaccgaggccgcccagaaggctggcaagttcgaggctgagatcgtccccgtgcccgtgaaggtcaagaaggacatcgtggagttcaaggtggacgagttcccccgtgccggcgtgaccgccgagggcatctccaagctgaagggcgccttccccgtgggccccgagtcccccaatccccaggtggtccacacctttgagcccaccggcatccaggagaccgacgacaagggtcagcagcgcgtgactgccgccaacgcctccggcatcaacgacggcgccgccgcactggtgctggcctccggtgaggctgtggagaagtacggcctgaagcccatggccaagctgatcggctggggccagggcggcgtggatcccaagatcatgggcgtcggccccgtgcccgcctcccgtcaggccatgaccaaggccggcgtgaccatcgacgatatcgacctggtggaggccaacgaggcgttcgccgcccagtccatcgccgtggcccgtgagctgggctttgacatgagcaaggtcaacgtcaacggcggcgccatctccctgggccaccccgtcggcgcgtccggtgcccggatcatcgtgaccctgctgcacgagatgcagaagcggcccgaggccaagaagggcctggctactctgtgcatcggcggcggcatgggcgttgccaccgtgttcgagaagtgctgaattgatcttccggcagagcaccgtctccgctggatgtgaaaaggcgtccccggccattagccgggggcgcctctttttttgtgccgggaagcggcgtgccgcagggccgccatccagcagaacggcaggaggacgagggtataaaagcgcctggaggcggcctgagaggatgccccagcagtttgcggatcgcacatcagccggagtttttgcagggaccgcgctatgaaaggcacctggcagccgctggaatgcggtggaacggataagaaggccgctgtaagccgaaaactggcttacagcggctgacttggcacccctgaccagactctaactggtggcctaccgcttaggagtacggcgtaccatttcgtaaattgttcatatcatatcttcccgtgttgtttcttcgcaaattgtgctgcctggaggcaggtcaatttgcacaaattcccctgaaatatgctgccttacaacggcttttcaaatgtcgtattagcaaggtattagcaggaaccccttgtgacagagggcttccaggggccgtttgaaaatgctattagcaagggaggatcattttatgagcaccaacgaaaaagggatgccccaaagcagaacatacaccgtgaatgacatcgcagccattctcggtatcggccgcgcctcggcctataaactagccaactccggagcgttcaagacaatccgcatcggcaacatgattcgcatctccagaaagtcctttgaggattggctaaaggcagaggggctggacgacgaaacggaataagtgcttaaactgccgcaggctgttagtctgcggcaatttaatatagtagacaatttaaaaggacctggttttttagctttgcagtattgaaatatctgcagaaaatctatcaagttttgcgctttcttgatgtaactctctgcgagccgctcttaatttttcttctatgagtgcaagtttttcttcggcactctctttttggcgcacagcatattccaccttttccgctgaatagcgccgcaaattcgcttggcggttaaacagtgcttttctcgcttttgatattagagaaagaattttgatttcgtctttattccaaatcgtcaaaattattatgaatattgaaattacagccgtaataatgcctaatacttcagaataatttgtgccaatgtaaactgcaagtcctattgctattaacgatgctattgttattattatttttaaccctaaaatttgtttgttgacagacttatcaattgcatcttttacctgatcttgttcactcagaaattcagaaacatcttctatctctttctttacgtccgttctatctttctctaatacctcaacattccgctggcactcaaaaataatcctttgttgtttagcttttgcaagttcaaactctgccgtttcgtttttccttgttaaattatcaatttcttcttggcgcgatatgcttccttccgtatatgcactctgacgaatttcctttagaatttctagcggtgtggagtctataatcttatcagaagcatttgccgttagttttccgagaattctttgagcaacagggctaactttcaagaaatagcattgctccggagtaatatcaccttttttctccaactttattagcgcatcatttaatttttttgtaacatcattagaaggtcgaaatgcagcatatgcagcagaaaccagccggggcctattaatcgaagatagtgtagacgggctattaaaccagacaagagttccccatttaatgtcggtcataacggttggtataaagaaatcctttgatccagcaaattctagagaaatcttatatccaacccgtgccaatgatctatttccggtgataaaaatgtttttgacctcatttagatgatacggaacaactgtattgtttttatgttgagtaaagaaaatggatttagcatcttggttaatactataatccttatcatcaatttggacatcagggttcgattctttgtattccgagacaatcatttctttaataattgcttctgtcggagtctgtatatcttccactttgggatatggcatattgtctataacgatattaaaatcttcttttaagcgagttcgtacattacaagagaactcatcaatttcatctatgctccactgattgcgtacaaagaaataagttgcttcagaagaaagcgttgcatcataattgggattgttaatccacgactttgaaccttcgatgatgccgatcatttcgctaacggtatgatcatataccttgacatgcatgcctagtttttggatatttctgacaaatagttcatagctatcagcacggtcagagctatcaataccaaatagcttaaacagtaagccagtatccaaatacacacatgcgtccttagctgtataagattgaggagattcacaatatgcaaagacttccgacaatgctaggccaatggtataatcgttcaaatagtccaaaatgtcggcctgacctgtttcttcacaatggaccaaaaaagctgcaaacaaataatcgtctttgacttctcttaacacccttctatctactttagttttaatgccatatcgctcaataaatgcaagtattttgtcacccatatcttcatcagaagaatagatgttatactcttgttgcaaaaaaactttgaatcgagcaaggatttctcgatatttttggtctgttttttcaacaatatccataaagtcctcttcatcaatatgggcatagtcagggacaaactgatgtatagaggaattatatgttagaaacccaaagttaatacatgtagaaagaattgtttgcattggatgatagggaactgaaaagccataataggctttgaaatctttacatagagtgtctatatcgcatgttttgtatctatttctctgtatgagagccgcaatcattctggcataagcgtggagtatatcttctctagaacaggaacttagagcagcatagcaggctattgtcgaaaatgagctcatggctgttacctctctgtatctattttggggtaaatttcattttaaagtataaatccaattcaggtaaatttcaattctatgagtattgatttctgacataaatcgactttccttgtaaatctcaagaacagagcagtttaaaggtcataggtttagtcctatggccttttttcatatccatttgtatctttgtatcatttattctggctctgagattaccacaacgatattctgattaccaagtcaaaactgacacgaaaggagtcgaaaatcccatgttttttctcccacagtcagccggaagtccccgcccataggttttcctctccggggtatccgggcggcatagataccgcctttctcccaaaaacgaacacttttccaaaccgctgaaaggaggtgataacatggcggtatttcgcattgaaaaaacccgagactacacggtgatgtccaaccaccacctgcggaatgcggggctgtcgctgaaatccaaagggctgctctccatgatgctgtccttgccagaggactggaactacaccaccagaggcttggccaaaatctgcaaggagggtacggacagcatcggttccgccctgaaggagctggagcgggccgggtacatagtccgcaatcggctccgggacagcaagggcaagatcgtggatgtggagtatgtcatctacgagacaccccatcccccggacacgggccagccgtgtgaggatgagccggatacggcttgtccaaatacggaaaacccggatatggataacccatgtctggaaaaccggccgcaattaaataaagagaaaagaaatcctgaagaacaaaatactgattcatcaagtacggaaggatcaaatccaatccaatcaagcccccaaacccccgcaggggccaaccggaccggacgggactggatgcgggagcgagagagctatcgggaactgattctggagaacatcgagtatgactatctatgccgggatgaccggctggatcgggatatgctgaatgagctggtggagctcatggtggataccgtctgttcccgcagggagacgatccgcattgccggggacgactacccggcggaggtggtcaaatcccgatttctgaagctgaacagttcccacatcgagtatgtgctggaccggatgcgggacaacaccacctatgtccgcaatatcaagaaatatctgctggctgctctgtataacgctccggccaccatcgacagctactatgcgtccctggtgaaccacgacctctacggcagcggagaaaggagatgataggtcatgcaggaagaagtcacccagcgcaccgttgccctctgtgtggaggctacaaagctctccgccgggatgctgcaacaggccatgaaaaaagtgctggacgagatgcagaaaggagtgaccggccacaagaccaagctgcaccacggcaagcagaccctccggcagttgatgaagcacaataccggcgtttcaaacatcgagatcactgaccagaacatccgggccttttccgccaccgccaagaagtacggcattgacttcgcgctgaaaaaggacaccagcggcgagataccccgctacctagtgttcttcaagggccgggatgccgacgttatcacggcggcttttcgggagttttctgcaaagaacctggagaaagagaaaaagccctccatccgcaaggagctggaccaggcaaagcaacaggccaaagcccaacaccgccagcgggagaaagtcaaaaccaaagaccggggtgtggaattatgaccgacacctggaaaaaggctctcttcctcaatctcccgtatctgctgtttgtctatctctttgataagctctgccaggcggtgcgctttgcacccggccttgacgcctctgaaaagttcctgcatttgagccagagctttacggaggcgttttcttctgggctgcccagcctgcatccgctggacctgctggcgggtatcgtcggggcggtcatcgttcggctggcggtatacgccaaagggaaaaacgtccgcaaataccgcaagggcattgagtacggcagcgcccgatggggcacggcggcggatattgccccctatgtcgatccggtccccgactggaacatccctctgacccagacggaaaagctcaccatgtccagccgcccgaaaaatcccaagtacgcccggaacaaaaacatcctggtcatcggaggcagcggcagcggtaagacccgtttcttcgtcaagccctccctgatgcagatgcacagcagctatgtggtcaccgatcccaaaggacagcttttgtccgaggtgggaaccatgctgcgccggggcgcccccaagctggacgagaacggaaagcccatgcgggacgcccgcgggaaggtcatctatgagccgtaccacatcaaggtcctcaacaccatcaacttcaaaaagagcatgaaatacaaccccttcgcctacattcggtcagagaaagacgtcctcaaattggtcaatgtcatcatcgccaacaccaaaggcgacggggaaaaatcctccgaagatttttgggtgaaggccgagcgccttttgtactgtgccctgattgggtacatctggtacgaggcggagccggaggaaaagaacttcctcacgctgctggagctcatcaacgcatccgaggccagagaggatgacgaggaatttcagagcccggttgacctgctctttgccaagttggagaaagagcacccggaccacttcgccgtgaagcagtaccgcaaattcaaattggccgccggtgttgtatgctctaaaagacttcttaatcaagcagttgggaagtctcttagaacacacaacccaaaatcgaagaaaggagcgcaagttatgagaaaaaatgagaaaatcacagctctgtacgaacgactgagccgtgatgactttggcaaagatgatgaccaacagcgtgagagcaattccatttccaatcaaaaggctatgttggaggagttcgccgcacggcagggctttacaaacattgtccatttcacggacgatggtattagtggtacttgctttgaccgtcccggatttttagcaatgatgaaagaagtggaagccgggaatgtggagtacctgtgtatcaaggacatgagccgcatgggtcgtgactatctgaaagtcggtcagattatggaaatcctgcgtcagcgtggcgttcgccttatcgccatcaatgacggcgtggacagtgccagaggggacgatgattttacccctttccgcaacattatgaacgaatactacgccagagacaccagccgtaaaatccgttccactttccagtccaaaggcaagtccggcaagcacctcacaggcacggtcatttacggctatctttggaacgaagccagagaccaatggttggttgaccccgaagccgccgaggtggtcaagcgcatctttgccatgacgattgacggctacggtccgtatcagatcgccagcaagctgaaagaagaaaaagtcctcattccgtccgcttaccttgcccggcacggcgagggcgtgaacaaaaataagaccttcaaagatgtgtacggctggggttcttccaccatctgcaacattcttgaaaagcgtgaatatctgggacacaccatcaacttcaagacccgaaagcacttcaaggacaagaaaagccattatgtcccggaggacgaatggacaattttcgagaatacccatgaagctatcattgaccagcagacctttgaccttgtgcagaaaatccgtgggaatgtcagacgctacccggacggctggggcgaagcagctcccctcacaggcttgctttattgtgccgattgcggcggcaagatgtatgtccaccgtaccaacaacggcaagcgtatttctcaatatacctgttcccaatacagcaaagtcccagttggaaagctctgcacgacacagcaccgtatcaatgaagatgtggtactgtcccttgtttccgaaatgctcaaagctattgccgagtatgcgaagcatgacagagccgagtttgtccgagtggtgcaggaagcgcagtccagccagcagacggcagaggtcaagaaacagcggatacgccttgccaccgcaaagcagagagtttccgagctggaagtcctgctctgcaaaatctatgaggacaacattttaggaaagctgtctgacagcagatatgccactctggacgctcaatatgaaaaggagcagaccgagcttaccgctgaaatctctgttctggaaaaggctatcaagagctacgagaagcacgaaaaggacgctgaccgttttatcgctctgattgacaagtatgagaacttcgacaagctgacgattgccatgctcaatgagtttattgagaaaatccttgtgcatgagcgtgaccgcaagggcagtattcagaccacacaggaggtcgagatttacttcaatttcgtgggtcgtttcgttccccctgcgtttggcgaagtggagcttaccccggaggaattagaggaaatccgcaagcgtgaggaacgcaaggacaggctccaccagaactacttgaagcggaaagccagcggagcacagaagcgatacgaggacaaaatcaaaaagcggaaaaaggcagaaatcgaagccaagaaagccgccattcgtgcggaggacattgcaaagggcgtgttcgtccctgtcagcagtttaccgcagagagagccgatgaaaggagtacaaacagcatgaatatcacttacacacagaacggcgattatcttatcccaaacatcattatccgcaagaccaagcccctcggacactacggcagacttcgcaaggcgtatctggaaatgcaccatccgatactgttcaatgagctggtgctatccgacaagctctttgagcattgcgccgagattgacgaaacagcacgaaaccgcatggagctgatcgtgcggtcactggcagagcaaaacggcgtgaccgagcaactgaaagccgaaaaccaaatggaatgggtgcggcagatgaacgcttgcaaggcacaggcagaggagattgtgaaagtggaattgatttatgattgagcgaggaagtccgggcagaaaactgttcggacttttctcatgtagtccaaagttgcggtagaattgttcacgagttttatggtacaatttatgcgaataaagaaaacggaaaattagaatctaacaagagaatgtggttgtatgaaaaaatccatattagtattttgggcaatcgtgtgtctgttacctattcaaaggaggtttaagaattttaaatgaaacatataagaaatatattgctgttgattacgattatttttgcttttgttatgcaagctgaagtatatcaaaatatgctctggaactttaatggtgcttattatttatcgtccagatacacaactactaatgacgatatggattcatttttagccaatgcagaagatacagctgagaagcatggtgttcatattttttcgacttttaatcagagagtttctaattatcagacaagactttatatttatggtgatgataccgttgttcgggatagtcttaaaagcacaatggatattgaggaaaaaacatatacggctttgataggcggaatcaccgtaatagaatttgaagattttagagaagcaaaaaacacaggcaatggacaggaaataatggtcagctatatcggtgacgatgatgacattattgccacatatcaagatttggcaaaagaatattctatatcgcagccagagttttggcaatcaaccgaaactgatatgatgttcattgtttggggcctggttgccatattgatgattgtacttaatatgattgaggtgatacgcagacaaaaggaagtagttgtacgagcttctctgggcgaaaatgctgctgtgattgctctaaaagctgtagtggctgatatgatttcatatgctgcattattcgtcttagcaaagttgcttgtttctcaatttatatcgggagcgtatgaagatcatctcattttggcagtgtattgtgccggagcagttctttccgtaattccttatgctgcttttgtccgctttgatgtaaaaaaagcctttgccaatgcttcagataaaaaaggtatgttttatcttctgaacggtcttaaagtatttgctactgctatgacgatttttacaataactacaaatctcagtagcattcaaggtaatttacttacaaacactactcttttagaaaatcattataatgattactattttggagttatgcagattgaacctccttttgaagaaaatgaggaggaatccaaagagagcgaattttggaatgacctttacgaaaatgaatacaacactataaatccggtggtctgcataggcagccggataagcgatacggataattatatttttgtaaatcataatgccagagatatgctgcaagggttttctgatatgcttactgaagatgatgaaaaagaggatatcgtggtcttcgtgccaaagggaaaaaatgcggaatcatacaaagatatcgcaaaagaggaaattgactctcttacccaaaatgcagaagaactgcgtgttgtttataaagaatattctggcagagagcaattttattatctcaattcgaacagagaagaggctattgacggattgtcaagagcaacaaatccgattgttatttatcaggcaaatgaggctgttgctttgaatggaagttatatcgaaacaggaacatataatggtgaggtgatctacggatgcgatgaaagcacaattcgtaatgctgcgaaaaaatatgcagaacagcttggtccacactattttatgctgacgaatgtcggggaggattatacttatagtcatagtttcctcgtgaaactgattggctttataagctctctttgcgtattagtattgctgttagatatcgctatcatcatatctgaagtgaaaatggaatttagacttaatgcgatggaaatctccctcaaaaaggttttgggctatcgcttttatgaaaggcacaaaagatttatttccgttaatctcttagaaaatatagccgttgtgatattgatttgcattgtttcgctttttatatctaacgcaagtgtcgggattgctttactggttggagcattgctcaccattattgaaatggcaatcattttcacaaatgttatgtgggttgaaaaaacaaatatctcaaagtccttgaaaggtggatgtttatgattataattcgtggcttaaataaagcatttggagagaaaataattttctccaactttaatttggaaattccggatggaagttttgtagtaatcagcggggatagcggcagtggaaaaagcactttgctcaatatgattggtggtatcgaaaagccggatagcggcagtatcataatcgaagggctgaatattacccggcttaaaaataaaaacagtttttttgcggatacagtggggtttctttttcagaattttgcactgcttgaaaataagacagttaaagaaaatttaagtttgattaaaaaatcaagccgaactaaagtatcacttaaagaagctcttaatcgtgtggggttatcaaaggaagttaacaaaaaagtttatcagctttccggtggtgaacaacagagagttgctttagctcgtcttatgatgaaaaaatgttctgttgttttggcagatgaacctactggctcacttgacaagaaaaatagagatattgttatgaggttattgcacgaactcaatgaagaaggtaaaacggttatcattgttacccacgatcagggtattattgaagatgaaccttatgttgtgaaaatctgagagtacctcttagaaatgtcttgatctacattttatgtaatttgggtcagaagaaaatccctttaggaactaaagggcgcattatcccagatattcaattatccgaggaaattcttaaatattgctgatattaaaggctttcaaagaaatatcctcggataatgtaatggctatttcagaaaatcaggcaactgattttccttctgattagcaggggtttccttttgatgtgaaaaccatttctcgttccaatctcggatatacctgttcacggtactctgggaaagctctgcgtaccgttcagtcgtagaaatcgaggaatgtccgagaaagtttttgattgctatgatcgggactccggcttctaacatatgtgtggcggttgtatgtctcatggtatgcggggtataacacttttcaagaaacatcttcggatactccgccttggcaagggcaacatattttttataaatttcctcaatgcaggagatagtcatctgcggatgtgtctggctggaaaagatataggcatctaaccgtccagttctgcctgtttcttccagataccgtttcaggaggattccgctaggtttagcgattacaatcctgcgggtcttattcccttttcctgtgattgtcagcttgtacagatttttttcaacaaggaaatctctgactttaagatcacagatttcctgtgccctggctccgcttgcatacatcaggtttaaaagaacctggtcacggaagcccaagcgtttttcagtgtcaggaagccggagcagggctgacacttcatcaagcgaaaaaataatccttggctggctggatgccttttttacaggaatcctccttacagcattcgcaaacacagtcgccgcttcaaaatttctgttctgtgcgtaagcggcaaaggatgtgagtgccgaaagccggaggttccttgtggataccgagcagccccgttctgtttcgatccatttcaggaaactgtcgattgtttcaaaatcgagatcctgaaacacgatttctccggcatctttctttttcacttgataaacatactggaacagaagccgaaaagaatgcttatacgatcggacggtgttaggagaaagacctgatgagagcggcatatattccgtaaaaaactgttccagcagaagcatgaagtcgggaagtttatttttcctcatcgcccacctccatgaatacgctgacagcatagtcttcaaacaattccgtgtattcggggaacatgtcgctgctgaatttcaggtacttctcagtctcgttcatgtcatggtgtccaagataaacggacaggaacggtacagaatcatttaccggacgtccttttttctctgcctgtacaaaagaatggatggcaaagtaatgacggaaacaatgaagacattgacctctggaatgagcctttccaggtacacacaggttggtttgctgtaacagcttcctgaaccgtaatccgaaagttccttttgtaacagctgccccttttttcctgaccgatggaaacaggtggctttccggctctgttttgattgccatcgcaatgcagtacttttccagcattctggttaatgttacatccatcggaacgacacgctgcttgttattcttggcatggcggatcaggatagttccgcgggaaaagtttatatccttcaccctggcagcaagtggttcccccaaccggaatccgcagcccaaaagcatccgcagtaacatacagaactccatgtccatctgtcgcgtttgcgggtctgtgtgcctactgccccagctatcggcactggccagaagcatttgtatttcctcatccgaaaaaatatatgggacatagctgtctgatgttttagggcagtcaggcataaaaacactgtagccttcatactggagataccttaaaaatttccggagatagctcaccttgtcgctgactgttttaggtgcgttagtctggagaagtctgccaatccaacgattcactgtcctttctgagatttcgccggtattttcttctgccagcagtgagtcgaacgaaagcaggattctgcgtgtattctgtaaagtaccgtcactgattgtgccctggctgattgcaaggtattccgccagctcgtttttgaaaatgcttttaaattcattcatgacaaagaccaccttccttccagaaaaccggcaaatgtacctgctgcttccggtacagggagtgcgtagccccgaagctgctcaatgtccagactggcataagaacggatggcattttggtctgtatgtccaagagtttttcttacgacttcataagggatgttgtcattgaccatggaacttgcaagggatgcccggaaggcatgtgctccctgcttgcgtttacctggatcgattcctgctgtttcaatggcagtccttacaatcttagtgattgcctgtactgagatatggctgtaaggcggaataattcggagaaacacatatggactttcattgtcggcacgctcttcctgtaaatatctctccaaagcagtttttacatcgggaaccatgggaagttcaatagtgacactggttttatgctgggtaagcaggatcaggtccctgtcaaaatccagctctttgaatgtcatggatgaaatgtccccgcttctgattccgagccgcgtcgcaaggagcagggctgcataatcacgctttccgtgtggggaagtctggtctatgctgctttcgatttttagaatttcatctgttgtgtatacagaagggtatggctgcggtcttttaaaaagagggacaataccactgtaatccctgtcggtatgaccggactgataagcataccggagaaatgtccggatgtgggaaagataccacttgctgctgactgataagcatacggttcctatattttggggattcatttcctgcggtttcacacaaccgattctggttagggcggataaaaagtaatgtccaatcttatcatgaagatgaattgtactttcctgtagccccttacgtcgtccgtcttcaagatattccgacaaaaaagcatccatctcgggattcagttcctgatacctgcatgatgcaatgtcgttttcgtttgtctgttgacacatggttaaaacctcctcgttattttagtggctttaactgtaccatacatgaaaaacgttatccgagattttctgttcaaaacccagaataccaaacgacatttgaagtttacctcggataattgaatatctgggataatgcgccctatcccagaactcggatagggcgcacttctatactctctgtcgagagtagtgcgtcctgcggagcttcattctctgtcagcagaagaaaactgcctgacctcgaatgtttccgtcacttcgtttcgacaaggtggctacacccccttgcgccgcttatgcggctatcccctgtggacttgccgtccgcaaacagcatgaaatgctgttcgccgccagcaagtttgattttgaaaatccaactaaaaggagaagcataattatgaaacggaaattggtaatgttactaactattgtagcggttctcgcagtagggattggtatctggtacaatgttcctattaacttgatggatttggaacatgatgaagttatagaaattgtcgtattcaatggaaatactggaaatgcaactcacatcacagatgagacacaaatcgaacatattattgaaaatctaaatgaaatcaagttaaaaaggtcgaagccgtctgttggttattctggatatagctttaagatgaccatttatttatccgatggtaatgaagccgatgattggaataactttatcatcaattccgatgatactattcggaaagaccctttcttttacaaggtggtttcagaaaaaattgattatgattatatagctggtatcgtaaactaaagtgagataatcattgcaactgaatactaaaaaacagaccgttgatacacatgaccgtgtgaaaaaatcagcggtctttttttatacccattttcaaaaaaggaggtcatgaaacatggcaaaaacgaaaaccctcgaccagcttagagccgaaaaagaacaagctgaagctcagcttcttcaggaacagcacaagctccaaaggctggaacagaggaagaaacactatgagaaaggcgaacgcaagaaacgcacccaccgcctttgcaatctgggcggcatggtggaaagcgttgccccggaggttaaggacttgacacgcaccgaaatgacagagctgatggaacacatcttttctctgtccgaagtccagcgagccgtccgtcacatggcgattacccacatcaacaaagcgaacggaggaaaggagttgaaagccgatggcactatttcatctgagtgtcacgcagactaagcgaagcgcaggacagtccgctatcgcttctgctgcctaccgagccggggagcgattgtatagcgagtattacggcgaatacagcgactacacccgcaagggcggcgtgatctgctctgacattctcttgccgtcccatgctcccccggaatttgcagaccgtcagaccttgtggaacgccgtggaaaaagccgagcgtggtaagaacgcccagcttgcatacagctttgacattgccttgcagaatgaattttcccttgaggaaaacatcgctcttgcaaggcaatttttattggagaactttgtgagccgtggcatggtggttgacttcgccgtacaccagccagaccgggaggacggcggcataccaaacccacattttcatgtgctttgccctatccgccccatcgagcagaacggcaaatggggactaaagcaacgccgggtgtatgagctggacgaggacggcaaccgtatccgagacgcagacggaaagtttgtgttcaacgccgttcccactaccgactggggcagtcccgaaacgctggaatactggcggcagacatgggcggagctatgcaatgccaagtttgcggaaaaaggtattgatgttcgtatcgaccaccggagctatgagcgtcagggcgtggagcttcttcccaccgtccacgagggcgcaaccgtccgggcaatggagaagaaaggcatacgcaccgagaaaggcgagttcaaccgctggatcaaagccaccaatgccgttatccgtgacatcaagaagaaaatcgctctcctgttcgattggattgccgaagcaaaagcggagcttgccaagccgcaggcacccgaccttgtttcgctgctgagcgcctattacacccagcgcagagccggggcatattcgcagaaaggcaaggtcagcaatctaaaggagatgaacgagactttcaattatctccgggcaaacggcatttactcccttgaagatttggaaagccgtgtcagcgaacacagtgctgccacagagagcttgaagaaaacgctggacgaacagaccgcccgaatgaaagcaattaagcagctctatgacagctccgctgctttccagagcttgaagcctgtctatgacggcttgcagaaaatcaagtttgagaagcccagagccaagtacaaggcagagcatgaagcggaactgaaacagttctacgccgccagacgcaagctgaccggagagttcccggacggcaaggtggatatgaaaaagctgaccgaagagtatgacgagctggaacaggcgcacaacaccacctatggcgagtttaagaccgtcagagacgatttacaccgtctttggaaggtcaagtcatgtgtagatactgccgcccgatttaacgagcgtacagaggaacaaatgcaccaaaatcgaccccaaacacgacacaaaaaggaggatatatcccgatgaattacacccaagcacagattgaccgggcgaacgccgtcagtctggaagattttctccgcacacagggagagacacttatcaaaagcggacgagaataccgctggaaagaacatgacagcctgaccgtccggggaaacaagtggtttcgccacagccagagcaagggcggctatcccattgatttcgtcatggagttttacggcaagtcctttcccgaagctgtccagatgttgacaggcgaaaacggcgagggacagaccgaagccaccacagcaccgcccacagcgttccacttgcccttgcacaacagaacagccgacagagcaattcaatatctttgcgaaagccgaggtctcaacaaaacgcttgttgagacttttcttctttccggggatatttacgaggacgcaaagcggcacaatgttgtgtttgtcggcagagaccgaagtggtacgccgagatacgcccatgtgcgaggaacggcagacccattcagacaggacattgccggggctgacaagtcctatccgttccgctatgagggaaacggcaatcagctctttgtctttgaagcaccgattgacctgttatcattcatctgcctttatccgcaggactggcagacaaggagctaccttgccctgggcggcgtttcaggcaaagcccttgaccgttttctttctgaacgcaaggacacccgaaaagtgttcctctgccttgacagcgacaccgcaggaagtgaagcctgcacccggctggcacagtccattcccggcgagatcgccgtcattcgccttgtcccggcaaggaaagactggaacgatgttctccgtcagcaaggggacattcccagccgcaaattcatagccgagacaatcacgctgcgagagctgcccaccgcccagcctgttcccatgctccgcatggcagatgtggagctgacgagcgtggattggctatggtttccctatatcccctttggaaagctgacgattatacagggcaaccccggcgagggcaagacctactttgccatgcgtcttgcggcggcttgtaccaaccgaaagcctttacccggtatggagacccttgagcctttcaacatcatctaccagaccgcagaggacggtctgggcgataccgtcaagccccgactgatggaagcggaagcagaccttgaaagagtgcttgtcattgacgatagggacacaccgctgacccttgccgatgagcgcatagcaagggcaatccgggaaaacaacgcaaggctggttatcattgacccggtgcaggcgtttctgggcgcagatgtggacatgaaccgggcaaatgaagtccgtcccattttccgcagtctgggagatattgcacaggctactgggtgcgctatcgtgctgataggacacctgaacaaagccgcaggaacacaaagcacttacaggggcttagggtctatcgacattacggcggcagtccgcagtctgctctttatcggcaagctgaaggacagccccacaacgagggtgcttatccatgagaaaagctcccttgcgccgcccggacagtcccttgccttttctctgggagacgagaaaggctttgaatggataggagcttatgacattaccgctgacgagcttcttgccggggcagacaacaccaagaccgagagcaagaccgcacaagcgcaaatgctcattctggaactgcttgcggacggaaagcgtatgccgagcgcagagctggaaaaggcagtcaatgagcgtgggatttcctcacgcaccatgagaacggcaaagagccgtatcggggacagacttgtgaccgagaaagacggcacagcatgggtctgctatctccgagactgacaacaggaacacggcaagcgtggcaaagacggcaagggttttatagataccttaatgttgccgccttgccttgttccctcatactgacaccgcccgatgatgaacagttaccgggcactttttcatttacaggaggattttgaatgaacaatactgcaaccaacaccgccacttgcccgactgtcagaaagcagattggcaagaccacctatatcgtccgtgtccatttcagcgagaccgccaaggagacgatggaggacaaaatcaagcgtatgctccgtgaagaagtccgcaaaatgtgacttctttttgaatttgatgaaaaagtccttgacttttcgtctctggcaagaccctgaaatccatcctcattagctgcggcgcccgccttgctcccttcgatattgcggagctgcgggagatcatgtccgacgacgaactggagctggataccctgggcgaccggaaaacggcgctgttcctcattatgagcgacacggataccaccttcaacttcgtcatcgccatgctgcaaagccagctattcaatctcctttgcgacaaggcggacgatgtgtacggcggcaggctgcccgtccatgtgcggtgcctcctggacgagtttgccaacatcgggcagatacccaacttcgacaaactgatcgccaccatccggagccgggaaatctcggcttctattattttgcagtcccaaagccagttaaagaccatctacaaggacgccgcagataccattgtgggcaactgcgacaccaccttgtttttgggaggcaaggagaaatccaccctgaaagaaatctcggagctgctgggcaaggagaccatcgacagcttcaatcaatccgagaaccggggcagccaggtttcccacggcctcaattatcagaaattaggaaaggagctgatgactcaggacgaaattgcggtgatggacggaggcaagtgcatcttgcagcttcgaggggtgcggccatttttcagcgacaagtttgatataacgaagcatccccgctacaagtaccttgccgacgccgacaagaaaaacacctttgacattgaacggtacatgaaacgcagaccggccatcgtgaagccggacgagcctttcgatctgtacgaattgaaagcgaccgaccttcaacccaacaattcaactgaacgaaaggaaatgtgaatatgagcttttttactaacgctatcgacgttttgcagactctggtcatcgccctgggcggcggtctgtgcgtgtggggcggcatcaaccttctggaaggttacggccaggacaaccctgcctccaatgctcatgtacggtagagaagcacaaagcaaaacaaggatagccagccctgccactattccgaagtcaggggaacgcaatagaaaaatttatagctgtatgctatacttaattagcatttgaacatatcaagctgacacagcaatctctttacttgccgttaatgcgcgtctaccaatagtccgcacaaagcaagagtagcgtaaaggtataaaaatttcaaacttctttgtaacgaaattccgatttctccgtctaacctatgaagctgaaggaggtgatgacaagtatggactatgaaaagctctataaagcctactatttacaggtatactcgtatactatttctcttgccaaaaatcgtgagatagcagaggaaatcacgcagaacacattctataaggctgtttctacaacatcacaattcaaaggtaagtcagatgaattgacatggctctgctccatagcaaaaaacctttaccatgatgaaatgcgaagccgtcagcgagtagctaatgtgagtgaaatcaatgacttgccatcaaatgaaaatgttgagaactcagttgcagattctgacatggcgttccgcatacacctcgttcttcaccgtttggaagaaccatacaaagaagtctttcaacttcgcgtattcggggaactatctttttcacaaatcgctgcaatttttggaaaaacagaatcatgggcgagagttacttatcatcgtgcaaagctaaaaattcaagaaaggatggatgaaaagcatgagtaaacaatgcgatattgttcgagatattcttccgctgtatgttgacggtgcttgcagcgaagcaagcgcagagatggtaaaagagcatttgaacgcctgtgctgactgtaacgcaatttatcagaaattgctttctcacacgagcgaagatgttcttcacgaagaaagcgaaagcgttattatgcgccatgaggcaaaagaaaagcagagaggcagaaaaaagataacgattgctgttctcgtttccatcgctctttgtatcattgcaatttttacagctctctttctgttacctataaacattgcttatgagcctgtcaaaatcgacttcccatttgaggttgaagatgtcgaaaacgttgaaatgtaccactatgacggagtgcctgcatcagcagaaaagaaagtagttgttgctgaaaatgatataaagaccctgtatgataagttcaagggcttatccctaaaagacaaaacgactgaggaaactgccggagcagatgtgaccagttttagatttaacctctcagatggaacaagctacgatttgatttacgcctgctatggagttaaaaacggcgaattaaagtcagaagcaggcggttttaagtattttacaagtgcggatattggctcttattggaacaatttgaatacggaacttgaagcaattcctatcaatgagagtgaattgccgtgagcagatagcaaacccagccgagcctgtcaacggtcaagatgaacggcgcaaatgcgccgccgttgacagccccgcccgtctttgctgttcggtaatcaagagggcgacagcataaaatgctgccgccctctgccattattcagaaaggggggattttccatgaccgaacacgaaaagtatcaagaacatatccggcatacacacgatgccttttgcaagaccgttattcgccacgctgccatagacgcagcccggagcatacgcagccgccgcaagcgggaaatctcgcttgaatatctgatagaagaaaaacactatccattcagtaccacagataaatactttgcggagcaatccggcatgaccagctatccgcttttcgtctgtggtcagatggtgcttttggaaagtccagagcttgccgcagcgctgtccgcactatcacagatggaacaggaaatcattttcctgtactacttccaacgattgacgcatagggagattggacggagatatggacgggctggcaacacaaccgggcggcgtattcagatgattttacggcggctacgggcagagttggagggcttgtcctatgaaccagctacttccctatgagacaatcgttaaggcaagcgagggcgacccggaagctgttgccgccgtcctatcccattatgcgggatatatccgctcttgtgcgaaaatggacggacagattaacacggatatgcaggagcatatcgtcaggcaactgatagaaagcctgttgaagttccgctttgaccgctaaacagaaaagttgtataattagagcctgacaaattaaacttcaatgagggtagagcaaatggaacagattatcaattatagagacatacccacaaataaaaggattgacatattaaatgctcttgagcgaataggtttttttccggcatacggcggcgtgaaaacaatgcagcaaattatggaaaagtcagttccaggttcaggcccacaattttatttcgttttccgtgaaaatgagttgatagggtacaattttctcattggggacactaagaaatataaagcgttcccatggcttgctattagcaatatggatgagcagaagttgactgtttgtgaagaactgatgaaaatacaaattgccttttttgaagaactcggaatgcaaaagatagcagatcattgcgttaggattatggaagattacagaaaaggaattggaaagcagaaagaaagcgattgcagataaattccatttgaaaaacggctgacaatttaataccgccgcccatcacagcggcagataagcagtaaatcttgaaaaggtttactgctttttttgcgcccattttcaaaaatctttggcaaaccacaccgccggattgttgtagggagcagacagggaaaacaaaaaatttccgctgcgtttgccaaaacgcccccttttcaccgttgtagtggtgaacagcgggcagaacacgccgccgcaatcgctatattggtggagcaagccagtatatccgcaaaccagagccgccgaggaaagcggtagttttttagagccagagccgccgaggaaagcggtagttttttagagcaagattctaccgcagtaccaaaattcgcttatcgctcattttgcccctgcgggaatcttgttggggagtgccttccccaaaccctgccatgcggcttacgccgcttatcccgccgcagccatgcggcagtcgaaaggaggttttaccatgcgaaaacgatacaacacaccgcaccgcagccgggtagtcaaaacacgcatgaccgaggaagaatacgccgagtttgcagaaaggctttctgcctacaacatgagccaagccgagtttatccggcaagccataaccggggcagccatacgccccatcataaccgtttctcccgtcaatgatgagctgcttgccgctgttgggaagctgaccgccgaatacggcaggatcggcggcaacttaaaccagatagcccggacgctgaacgagtggcacagcccctacccgcagcttgccggggaggtacgggcggcggtttccgaccttgctgccctaaagtttgaagtcttgcagaaagtgggtgacgctgttggcaacattcaaacatatcagctctaaaaatgcggactatggcgcagcggaagcctacctcacatttgagcatgacgagtttaccatgaagcccacccttgatgaaaacgggcggctgataccgagggaggattaccgcatttcttcccttaactgcgggggcgaggatttcgctgttgcctgtatgcgggctaatctccgctatgagaaaaaccaaaaacgggaagatgtgaaaagccaccactatatcatcagctttgacccacgggacgggacagacaacggcttgaccacagaccgggcgcaggaactgggggaacagttctgcaaggcacatttccccggacaccaagccctaatctgcacccacccggacgggcataaccacagcgggaatatccatgtgcatatcgtcatcaactccctgcggatttacgaagtcccgcttctgccctacatggacagaccagccgacacaagggagggctgcaagcaccgctgtaccaatgccgctatggaatatttcaagagtgaagtcatggagatgtgccaccgggaagggctttaccaaatcgacctcctaaacggcagcaaggaacggataacggaacgggaatactgggcggcaaagaaagggcagcttgcccttgataaagagaacgctgtcagagaagccgcaggacagccgaccaagcccaccaagtttgaaacggacaaggcgaagctgcgccggacgatacggcaggcactttcccaagctggcagctttgatgagttttcttcccttttgctgcgggagggcgtgaccgtcaaggagagccgggggcggttttcctacctcacgccggacaggacaaagcctatcacagcccggaagctgggggacaattttgacaaggctgctgtccttgccctgctcacgcagaacgcccacaaagccaccgagcagaccaaagccatacccgaataccttgtcgcagttaaaaagccgtcacaaggggaaaaacccacaaaaactaccccggcagacaacaccttgcagcgcatggttgaccgggaagccaagcgagccgagggcaagggcgtgggctatgaccgctgggcggcaaagcacaatctaaagcaaatggcaactaccgttaccgcctaccagcagtacggcttttcttccccggaggaactggacgaagcctgttctgccgcctatgccgccatgcgggaaagccttacagagctgaagcaggtggaaaagacgctgaacgggaaaaaggagctgcaacggcaggtgcttgcctattccaagacccgccctgtccgggacgggctgaaacagcagaaaaacgccaaagcaaaagcagcctaccgtcagaagcacgaaagcgactttatcatagcagacgcagccgcccgttatttcagggagaacggcatttccaagctgccgagctataaagccctgcaagcagagattgaaagccttatcaaagagaaaaacagcggctacaacgattaccgggcaaaacgggaggaataccgccgcttacagaccgtcaagggcaatatcgaccagattttacgccgggaacgcaagcctgtgaaaaggcaggaacaggagcgataaaaaccaccccaaaatgtacccgaacccatacagaacaagggggctgccccgtaccctatccgcaataccaaaggattttttaacgggcttacagggcagaaaaaccccgaaaatgataccgagataatacagaattaccgccgataccgccacaccagcggaaacggcagaaaggagcgcacccatgccaagaatgagcaagaaacggcggctggaatggtcttttttcctgcggcaagtaaaaatcgggaataccacctgcgaccgtatcacatacaacgacctctgccggagctgtacccatagctgcaagcagagcttccgggcggttatcatactctgcccccgctactactccaaacgccggaaaaaggaggacagggacaatggcagataaccgcaagtattactacctcaagctgaaagagaacttttttgacagcgactccattgtactgctggaagatatgaaagacgggattttatattccaatattctcttgaagctgtacttaaaatcgctgaaaaacggcgggaagttgcagcttgacgagcatatcccctacacagcgcagatgatagcgacactgacccgccaccagatagggacagttgagagggctttagagattttccggcagttggggcttgtggagcagcttgacagcggggctttctatatgaccgacattgagctgatgataggacagtcctctaccgaagccgagcgaaaacgggctgcaaggctggaaaacaaggcacttttaccgccccggacaaaaggcggacatttgtccgacattcgtccaccagagaaagagatagagttagagaaagagatagagatagaaaaagagagagagggagaaacgggacaccccgcccccgccgcttatggcagatacaacaatgtgatactgaccgatacagagctttccgggctgaaaacagagctgcccgacaagtgggagtattatattgaccggctttcctgccatatcgcttccaccgggaagcagtaccacagccatgcagccaccatttacaagtgggcgcaggaggacactgccaaaggcaaggctgccccgaaacagggcatacccgattattcatgcaaggagggcgagagcttatgaaaaacgagatggaagctatgattacggacattacagccactaccgccgaagcggaggactacacaggcgaggacgggcttttatactgcggcaagtgccatacgcccaaagaagcctactttgcagagggaaagacctgtttcgggcgtgaccgccacccaacagactgcgactgccagcgagcagcccgtgaaaagcagcaagccgccgaaagccgacagaagcaccttgaaaaagtggaggacttgaaacgccggggctttaccgaccctgctatgcggaactggacatttgagcatgacaacggcagaaacccgcagaccgaaaccgcccgcttttatgtggatagctgggaaaccatgcaggctgaaaatatcggctacctgttctggggcggcgtggggacaggaaaaagctaccttgccgcctgtatcgccaacgcccttatggaaaaagaggttgccgtctgcatgacaaactttgcaaccatactcaatgaccttgccgccagctttgagggcaggaacgaatatatttcccgcctttgcagctaccctctgctgatacttgatgatttcggtatggagcgagggacggaatacgggctggaacaggtttacagcgtgattgacagccgttaccgaagcggcaagccgctgatcgctacgaccaacctcacgctggaggaattgcagcacccgcaggacacgccccacgcccgtatctatgacaggctgacttccatgtgcgcccccgtccgcttcacgggcagcaacttccgaaaggaaaccgcacaggaaaagctggaacgattaaagcaactgatgaagcagcgaaaggagagcctatgacagaaaccaaacagacaagcaccaccaaaacagaccgccgcccggactgtgtgacggaaatccgcatgggcaactccgtccttaccgtttccggcttcttcaagcagggtgcaaccgacaccgcagccgacaagatgatgaaagtgctggaagcggaagctgctacacaaaaaacggcgatttgaccgaccataaagaagcagatttgacgcttttgccgctatacagacagccgccccatgtggtacaatcaaggtacggaatagtggggctggctgtcggaaacggaggattttatgttaagacagaccacccagaaaatcactgccctttatccaagactatcccatgaggacgagctgcaaggcgaaagcaattccatttccaaccagaagcgtattcttgaaacctacgcaaagcagaacggtttttccaatctgcgctggtacacggacgatggctattctggtgcgaacttccaaagaccgggttttcaatccatgcttgcggacattgaagccgggaaagtggctaccgttatcgtaaaggatatgtcgaggttagggcgaaactacctgcaagtgggaatgtacacggaaatgattttcccacagaaaggtgtccgcttcatcgctatcaatgacggagtggacagcgcacagggcgacaatgactttgccccgctgcggaatatctttaacgaatggctggtgagagatacgagcaagaaaatcaaagcagtaaaacgctcaaaaggcatgagtggcaagcccatcacaagcaagcctgtgtatggctacctcatggacgaggacgaaaatttcattattgacgaggaagccgcacccgtagtcaagcagatatacaacctctgccttgccgggaatggtccgaccaagatagcccgtatgctcacagagcagcaaatccccacgccggggacgctggaataccgcaggacgggcagcacacgccgctatcaccccggctatgaatgcaaatgggcgacaaatactgtggtgcatatccttgaaaatcgggagtacatgggctgtctggtgaacttcaagacggagaaaccgtcctacaagaccaaacacagcgtagaaaatcccattgagaaacaggcaattttcgagaaccaccatgagcctatcattgacacccagacatgggagcgtgtgcaggaattacgcaaacagcgcaagcgtccgaaccgctatgatgaagtgggcttgttctccggcatactgttctgtgcggactgcggcagtgtcatgtatcagcagcgataccagacggacaagcgcaagcaggactgttatatctgcggcaactacaagaaacgcacccatgactgtacggcgcactttatccgcaccgacctcttgaccgctggcgtactctccaatctgcggaaagtgacaagctatgcggcaaagcatgaagctcggtttatgaagctcttgattgagcagaacgaggacgggggcaagcgcaggaacgccgctaagaaaaaggaactggaagccgccgagaaacgcatagccgagttatccgctatcttcaagcggctgtatgaggacagcgtgaccgggcgcatatcagacgagcgtttcacagagctgtcggcagactatgaagcagaacaacgggagctgaaagaaagagccgctgctatccaagcggagctttccaaagcacaggaagccaccgtgaacgcagaaaagtttatgaatgttgtccggcggcataccagctttgaagaacttacccctactctgttgcgggagtttgtagagaaaatcgttgtgcatgagtgcagctatgacgagaacaagacccgtaggcaggacattgagatttattattcttttgttggcaaggtggacttgcccgaataaccgcccgacctatccgacatacctcatgtgccggataggaacggcaaaattttttacacttctattacttctttatcacacatcagtaaagagccagggcatcaagcagctcatggcgggcggcggcgttgccctcatcggcatcaccctgatccctctgctgtccggtctgctgtccaccacctaatgtttctccaaaaccggtgggggctttcgcttgatagcgggagcccccgcaaaggaggtgatctcccttgatattggatatgatccaggagtggttcaaggaactgctcattgacggtatcatttcaaacctgaccgggatgtttgataccctgaacacaaaggtgggcgagatcgccggggaggtcggcatgacacccgccgcctggaacagcagcatcttcaacatgatccgcaacctctcggagacggtgatcgtccccatcgcgggcatcatcctcaccttcgtcatgtgctacgagctgatccagctcatcatcgagaagaacaacctccacgacttcgacacctggattttcttcaagtggattttcaagaccttctgcgcggtgttgatcgtcaccaacatctggaacatcgtcatggcggtgttcgatgtggcgcagaatgtggtcagtcagtcggcgggggtcatcatctcggatgcgggcatcgacatctctggcgtggtgggcgatctggaaacccagcttgccgactggagcgtgggcgccctgctggggctgtggttccagagcgtgtttgtggggctgtgtacgcagatactttccatctgcatcttcctggtgatctacggcagaatgattgaggtgtatttggtgacctccataggccccatcccctttgccacgatggtcaaccgggaatggggctccacggggcagaactaccttcgctccctgctggccctgggcttccaggccttcctcattatgatttgcgtgggcatctacgcagtgctggtggagggcatctccacatccggcgacaacatatccgcggccatctggggctgcatgggctatacggttctactgtgctacaccctgttcaagaccggcagccttgcaaaatccctgttcggcgcccactaaaggaggtgtaaaacattggcttatgtaacgatcccgaaggacctgagccggatacagagcaaggttctgttcgggctgaccaaacgacaagtgatctgtttcggagcggcggcgctggtaggtgtgccgcttttctttttggcaaaagcgagcctggggaccaccacggcggcgctgtgcatgatcctggtgatgctgccctttttcctgttcgccatgtacgagaagaacgggcagccgctggaagtatttctgggccatctgatccagaacaaattcatccggccgaaggtgcgtatctaccagaccaacaatctctattccgccctggtgcggcaatcccaactggaacaggaggtgaagcggattgcgagaaaaggcagaaagaccggcgaagcgtaagctcacccgtaaccagcgcaagcagatcgaggcggtgatccggcaggctaagggcgacggaaaagcccatacggtgcaggacagcatcccgtttcagaatatgttccccgacggtctgtgcagactggagggcgggaccttttccaagaccattgcctttgaggatgtgaattaccgcctggctgggccggaggaccagcggagcatctttgaaagcctctgtgacttctacaacggctacgatccctccatcggcgtccaggtcactttggacagccgcagcggaggcagcgccgccgatgaaatgttcggcattacccggcagggcaacgacctggaccccatccgggacgaggcggtggacatcctgcggatgcagtacaaacggggcaacaacggctatgtgaaaaccaagtatgtgaccctgaccatcgaggcggagaaccttcccgcagcacgggcgcggtttgcccgcatcgagaccgacaccctcaaccgctttaaggtcatgggggcggcggctcatgtgctggacggaaaggaacggctggagctgctttacaacatcctccacccggagggtgggcagttcgcctttgaatgggactggctcccggccagcggcctttcggtgaaggacttcatttcgccgtcctccttccacttcggggagacccgcaccttccgcatcggcaggcggtacggggcggtgtcctttctgcaaatcctggcgccggagatgcacgaccgcatcctcaccgacttcatggaggcggacgggaatatcatggtgaccatgcacatccggggcatcaaccagaacgaggccatcaaaatggtcaagcgaaagatcaccgacctggacgccatgaagatacaggagcagaagcgggcggtacgcagcggttacgatatggacattcttccctccgacctttccacctacggcggcgcggcaaaggaccttctcaccgacctgcaatcccgcaacgagagaatgttcaacatgacctttctggttctgcacacggcggagacccggcaaaagctggagatcgccgtgtcccaggcggccagcgtcgcccagacctacaactgtcttctgacccggttggacttccagcaggaggacgggctgatgtcttctttgcctctgggcctcaactgcatcaagattgaacggagcctgaccacttcggccctggcggtgttcgtccccttcgtcacccaggaggtgttcatgggcggcgacgccatgtactatggcctcaatgccctctccaacaacatgatcctgctggaccgcaagcaatcccgctgtcccaacggccttgtgttcggcacgcctggcagcggcaaatccatgagctgcaaacgggagatcacctttatcatgctgatgacccaggacaatgtcatcatctgcgacccggaggacgagtattcgcccctggtgaagcggctgggcggccaggtaatccggctgtccccgtccagcaccgactatgtaaatcccctggacatcaacctcaactattccgaggaagaaaacccgctggcgctgaaatccgacttcgtgctgtccttctgcgagctcatcatgggcagcaagacggggctggaggccatcgaaaagacggtcatcgaccgggcggtgcagatgatctaccagccctactttgccgatccccgggcggagaatatgccgattttgggcgacctgatgaacgccctgctgtcccagcacatcccggaggccgaccgggttgcccaggcactggacctctatgtgaacggttcgctgaacttcttcaaccaccgcaccaccgtggacatctccaaccgccttatctgctttgacatcaagggcctgggcaagaacctgaaaaagcccggcatgctgattgtccaggatgcggtgtggaacaccgtcaccatcaaccgggccattggccggtctacctggtatttcgtggacgagttccaccttctgctgaaagaggaacagactgcggcgtacagcgccgagatttggaagcggttcagaaagtggggcggtatccccaccggggcgacccagaaccccaaagacctgctttcctctccggagattgaaaacatcctggaaaacagcgatttcatctatatgctcaaccaggcggcgggcgaccggaagatactggcggagcggctgaacatttcttctgaacagcttgcctatgtgaccaactccgagccgggccacgggctgctgttcttcaacaatgtcatcctgccctttgcggatgacttcccgaaggataccgaactttataagctgctcaccaccaagcccagcgaggtggaacatgaggaaaggatgggataaggatatggaacaggaaaagctgtatgtcattgaggaaaagacctacgaggcgcacatcgacgaggaggtccacctctacgggttgctccaccaactggcctttcttgccgggaagatcaaggaccgccgggacatggagaacctgatcgacaccgcccggcactatggggacattgccgaccagatgtttgaccgctggagcatccccggccgctatttggtgttcggcgacaaggacgaccttgcccggctgaaggccctggagctgtgcgagctggacgccttctatgtggactgcgaggacgacgaggaccagctccatgcctgaccgcctcacccatgtgagcctcttttccggtatcggcgggctggacctggcggcggaggcggcaggctttgaaacggtctgccaatgcgagtgggcggactatccctattccatcctgcaaaagcattggccggatgtgccgaaattccgggacatcaccacattcacgaaggaggcgttttttgaaagaacaggacttgaaaccgtcaccatcctctccggtggcttcccgtgccagcccttctccaccgccggaaaacggcgtggctttgcggatgaacgctacctgtggccggagatgtgccgcgttattgccgaactgcgaccccattgggtgcttggggaaaatgttgctggcttcatcaatatggggctcgacaaaacgatttttgacctggcaaaagcgggatacgctgttctcccattcgtatttccggcttgcggcgtcggcgcatggcatgagcgccagcgaacttttatcgtcgcggctgatgtttcccacaccccttgcctccgacaaatccacggggcgagacgctgccaacctggatgtgttcctgtcggacaatgggatattccgcaaacggaacaaggacgggtccatctggagcctgtccctgtcggcggcggtgttctacctgaccccggcagcgtcggaggactaccgttccaccctgaaaccggcggccttccgggacaaatccccgacctccaacctgtcggcccaggtgatccggcaggagcagcccttttccgaaaaggcggcgctgaacccggactgggtggaatggctcatgggattccccccgaaatggacggacgcatcctatggcgtgccgagcccgaaggagtcccccgcatgaccgaggacacggacaaccgggcgttgcggctgaaaaccctggggaatgcggtctgccctccccaggcctatcccattttccagtacatcgccatgatcgaaaccggggcctgtgtcaacatctgcccctatggaacaggaggtgacgcaccttgaaagaatggaaagcccccgaaaaggaggcgcagaagatgacccgtgacgggtcggtgtccgtcaatctggtcacgggcgagactacctatccctctgatcggacgccggagcaggactattccacatccggcgacgcggcgggcgccgctggaaaagcggtggaccgtgcggaactgcaccgggaacaggcagcagccaaaaagaagcgccggaaacagcgcagagcctatcgggagggcgaggcggcagcgggccgtccatcctcccgattgcagttttccgaggcggaccaggccaagccggagctgcaaggtgctatccgcaagtcggacaaggcggcggaccggctggatgccgccagagacgcgatccccaataagagtccgggaaagccccacaccaatccgctgtcccgccctattcaggaggcaggcgcggcgatccacggcaaggtccgggaggtggagcaagaaaattccggcgtccagtcgggccacctgggggaacgcagctttgagaaggctgtgggctacggaaaccgccgtgtccagaactggcgggcggaacgcaagctgaaaccctggcgagacgtagcaaaggcggagcaggcggcggtcaaggccaatgcggatttctgctatcggaaagccgtggcggagaacccccagcttgcatccaatcccatctcccgcctgtggcagaaaaggaagctgcaaaagcaatatgcggcggcatatcgggcagcgggcaagactgcccaggccgggaaaacagcggaggccacggcaaaggcggccaagaaaaccgcccaggagtccaagcgcaccgcccttttcctgaaacggcattggaagggcgcgctgatcgtgggcggcatcggccttctgctggtgatgctgctgggctccctgcaatcctgttcctccatgttcggcggcggagtgtccaacatcatggcgtcctcctatctctccgaggattccgatatgctggcggcggaagaagcctactgcgccaaagaggatgaattgcgggagtacctggatacctacgaggccacccacgactatgacgagtatcacttcgacctggatgaaattgagcacgacccctatgtgctgatctccattctgtcggcaatccatgaaggggtgttcaccatcgaccaggtacaggacgaccttcaaaacctctttgacaagcaatatatcctcaccgaaaccgtgacaacggagacccgctatcggacggaaacaaggacggacagcgagggcaatccttatacggtccaggtgccgtacacctggaccatctgcaccgtcacgctggaaaacttcgacctctcccatgtgccggtctacatgatgggcgaggaacagctttccttgtacgccacctatatgtccaccctgggcaaccgccccgacctgttcccgtcctccgggtatgtgaacaagtacatcgacaacccacctaccgcctgggagattcccgctgaatacctgacggacgagcggttcaatacccttatcaccgaggcagaaaagtatttgggctatccctatgtgtggggcggcagcagtcccagcgcttctttcgattgcagcggcttcgtcagttatgtgctgaccaacagcggcctgtgcaataccgggcggctgggcgcacaggggctctacaatatttccactccggtatccgacccccagcccggcgatctggtgttcttcgtggggacctacgatacaaccggcgtatctcatgtaggcatctatgtgggcgacgggatgatgctgcactgcggcgcccccatccagtattccaacctgaatacaagttactggcagtcccatttctacgcatacggcagaccgccgtacaactgatggaggtgatgaagtatcaatatggtttcctatgggggcggcgccaacagcaccgcccttctgatcgggctgcaccagcaccgtatcccggtggacctgatcctctttgcggatacgggggcagagcatccccacacctacgcctatctggaggtgatggattcctggctgaaggatcacgggatgccgtccattaccagagtatataagaccacccgtgagggtaaacggctgacgctggaagatgaatgtttgcaaagttgcagccttccgtctatcgcctacggcttcaagcggtgttccctgaaacacaagatcgggccgcaggaaaagttctgcaaccattacccgccatgccgccgaatatgggaggcgggcaagcgggtggtcaaatttattggctacgacgcgggcgagggctaccgcagcaataaggtgctgctgggggacttggccgaccgaaaatacagcaagtggtatcccctgatggaatggggatggacgcgggacgattgcatccggcagatcgaggcggcagggctgccccagccgggaaaatcgtcctgttttttctgccccagcatgaaacccgacgagatcaccgccctgcgggagcagtatcacgatttattccgccgcgccctggcgctggaggacaacgcccggcaaaatctgaaaacggtcaagggcctggggcggaactattcctggagagaacgatttggaaaggagttttgcacacatggcaacggttgagaagatccgcaaggacatcgaaaagacgaaggagaagatctccgcccagcagaagcgccttcgggagctggaggcgcagctcaccgaggaagaaaacctggagatcgtccgcatggtcaaggcggtgcgcatggacaacaaggagctgaccgcctttctgaaagcctacgccagcggccttatcaccctgcccgacgggatgatggaggcggaggcggcgccggaccccgacgacgaggatatggaaggaatggaggacggcgaagatgaagcgtaacagagttttccgccttttggcgtccctgacggcggtggtcctgtgcatgaccgccttctccgtcaccgcctttgcgggcggtggggatggcgactattacaccggggaacccgccgagacgaccccggaacccaccgaggaacccgccaccggaggcatggagccggaggaccagccccttaccccggagggcaacgccacgctggtggacgattattacggcgataagcagcttatcaccgtgaccacgaaagcgggcaactatttttacatcttaatcgaccgggcaaacaaggacaaggagatcgccgttcacttcttgaaccaggtggacgaagccgacctgatggcgctgatggaagatgggcagacggaggaacaacccgcagtctgcacctgcgtcgagaaatgccaggccggtgcggtgaataccgcctgtccggtctgcgcggtgaatatgagcgagtgcgccggaaaagcgccggaggtggagccggagcctgaaccggaaccggagaaggagtccggcagcggcggcgccctggtactgatcctgctgctggcggtcctgggcggcggcggagccttcgcctacatcaagttcatcaagcccaaacagggcgcaaaggtcagcgccgacccggacgattatgagttcgaggacgaggaatatgaaaacgaggacgttcctgaacaggaagaacaggaggaccagaattgagcaaattggtgatctgtgaaaaaccgagtgtagcaaagagtatcgcatcggccctgggtgtcacatccagggccgatggctattttgaaggcggcggctggctgatttcttggtgcattggtcatctggtgggactggcggacgcggccgcctacgatgaccgctataagaagtggcggtatgaggaccttcccatcctgcccgcccccttccgctatgtggtgtccgaggaaaaggctgaccagttccacattctccgttccctgatggaacgccctgatgtgacggaactggtcaacgcctgcgacgcggggcgcgaaggtgagctgattttccggctggtctatgaggctaccggatgttccaagcctttctcccgcctctggatttcttcgatggaggacgtggcgattcgggagggctttgccgacctgcgccccggcaaggactatgacccgctgtatcaatcggcactttgccgccaaaaggcggactggcttgttggtatcaatgcctcacggctcttttcggtgttgtatcatcgaacgttaaatattgggcgggtgcagacgcccaccctggcgatgctggccgaccgggacagcaagattgtcctgttccgcaaggagaaataccaccatgtgcggctggcgctggagagcgccgaggcggtcagcgaccgcattgtttccccggaggacgcccagaccatccgggatgcctgcgatggtaaaaaagcaacctgtgtatccgtggcgcaggagaaaaagacggagaaaccgcccaaactgtacgacctgaccaccttgcagcgggaggccaaccgggtgtttggctacacggccaagcaaaccctggactacgcccaatccctctatgaaaagaaactgctgacctatccccgcacggacagccggtatctgaccggcgacatggcggagaccgcctccgtggtcctgcatctggcggcgcgggtgcctcccttcgacgcctgcccagagtttttccccgatgttctggcgctgctgaacgacaaggaggtatccgaccaccacgccctgattcccaccctggagctggaaaaggaggatgtccctgcgctgcctgtgggcgagcgcaatatccttctgctggtctgctgcaagctgctgtgtgccgcagcggagcctttcgtgtatgaggcggtcacggctatctttgactgcggcggacataccttcacgaccaaaggaaaacaggtgctttcccagggctggcgggctatccaggaggtgttccgttcctccctgaaggagaagccggaggatgaagatgccgagggtgttcttcccgccttgaccgaggggcaggtttttgagccggtcgccgcctccgtcactgagcacttcacttcgccccccaagccctacaccgaggatacccttctgtcggccatggagaacgcaggcaaggaagatatgccggacgaggcagaacgcaagggcctgggcaccccggcgaccagggcggccatcatcgaaaagctggtgtccggcggatttgtcgagcgcaagggcaagaacctaatccccacaaaggcaggcgtcaacctggtcacggtgctgccggaactgctgacctctcccaaactcacagcggattgggagcagcggttgaacgaggtggcaaagggtcaggcggcgtcggaggctttcatggacgggatcgaggcgatgacggcggagctggtgcggaaatactcccacatttccgaggatgggcaaaagctgttccagccggagaaggagacggtggggctctgcccccgctgcggtaagccggtttatgagggtaagaagaacttcgcctgttcggaccgtgcctgtcagtttgtcatgtggaagaatgaccgctttttcgagcagcgcggaaaggtctttacttccaaaattgccactgcattgctcaaagacggaaagacaaaggtcaagggactgcgctccctgcgtactgggaaaacctatgacgggacaatcgttctggccgacaccggcgggaagtatgtgaattaccgcattgagaaataagtatcgtgtcgttcttccttcacggctctatccaagagtaacgatttgctgtataataaggccaaaatctttcaggaggtaaatagccgtgagggatatgatcgcatactgtgggctggactgtgagaagtgcgacgcttatcttgcaacgatcaacgacgatcaggcattgcgcgagaaaactgcaaaactatggtctgaattaaatcatgcgcccattctgccggagcatatcaactgtcaaggctgccgcgtggatggagtgaaaacggtgtattgtgaaagcctttgcggtattcgtcaatgcgcccgacaaaaaggcgtgacgacctgcggtgactgtcctgaattggaaagttgccagacagtcggcgcaattctttccaacaaccccgctgcgctggacaacctgaagggatagactacataccacaacaaaatagaagccgccagtgacggcatcaagcaggaaacctttccgggtttcctgcttttcttttacccattttcagaaaggatgatgtctttgagcaaaaccgaacctaatttcatggagcatttgaaaccgctgctccccgcaagcggtgacgcaagcgagctggaggcagcggcccaggcgcttgccggactttccctggaggatcgtgacctcctggccgctgtccaggagtcgccctatcgtctgaccaccctggagcagttccgggagtttcccgccaacgccgagtattttgtcctggagcccaacatcagcaaggtggaggatgtgggctggcgctatctggcgcagcatttggatgtccttctgcccccggagctgctggacgccattgatcccgttcccttcggcaaccacgccatgcaggaggaacaggggtgtttcaccagtaaggggtatctcaccctctccggcgacgagtgggagcacgagcgccccagggagaagcagacggagaaaaagccctccatcaaggagcggctggagcagggccggaaggaatgtgccaatcagagcaaggcgcagccccatcgggaaaagcctgcgccggaactgtaaggaggtgtcgctatgccccattatgattatgacaaagagtatccctttgccgctttcatcactaacctgggcaaatacaacgagggcgcccttgtgggtgaatgggtgaaatttcccaccacggcggaggaactgaaaaaggtctttgagcgcatcgggatcggcgcgaaggacgacttcgggcagacctatgaggaatggttcattacggactacgactgctatgtggacggcctctatgacctgctgggtgagtatgcaaacctggacgagctgaactacctggcttccaaactggatgatatgagccaggatgaatacgagcggttccaggcggccatggagatcggcgaccacacgggcagcatccaggagcttatcaatctgacggagaacctggactgttacgacatctaccctgacatccacgaccacgacgatctgggccggtattacatcgaggaactggacgccatgcaggtgccggagcatctgcgcaactacatcgactatgaggcctacggacgggacattgccctggaggaaagcggccagttcaccgacctgggctatgtgcgggacaccggggacagcttccatgagtattacgatggcgagcgcggcagcatcccggaggaataccaggtgatgaccttccaggacgacatccctgaagaagaaatttcggaatgggccatggaccttgcctacgatatggacgagtttttccggcagcacgacccgcagtatgccgccgagcacccggaggaacacgcggcgaaggaagaaatctacgaaaatctgatggccgggcgcatctccactctggacgagaagctggccgctctggggcagacccaggaggactatctgccttcggagattgagaagttcaaggacgccaccggctatgaggaatttctggatgtggacccgcaggcgattcgggaagctattgaaaacccggaccagtcccatgtggacgagatgctgtcctttgcggagcaggcaaatcgggagtatgaggcggagttgtacgggcagcaagcggcgcccaccccggatgaccgggagaccggcgaaacggtgcggactcccaggggaatcttccatgtgacggatatgagccgggaacagatggaggcggccggatacggttttcaccatgagtccgaggacgggaagtatctcatcatggccaatggcagccgtgcctttgccatccccagcggagccgcccccgaacataccgcgccggagaagctgactgttctggtggtggagcctatgaaggaaccctatgtgaaggagatcgatcccggccttcatgcgctgcaagcggaggtgggcggcgatattgccgcctcctatccctttgacgatccggtggggctggtgctgaatgatgaaggcaagctcatcggtctggacctgaaccgttccctccgggacgagcatggcgagatttacgacattgtggcgggcaccttcctggtggtgggcctggggccggagagtttcgcgtccctgcccccggacatgatccagaagtacactgagcaattcaagcggccggagctgttcgccagcatcaacgggcagatcgtatccgttcccgtggagccggaaaacccgctgcgcacggcggaaatgaccctagaggatgactacggcatgatcgacgggatcatcaacaacggccgccgtggggaggaattggagaaagcccaggccgaggcgcgcaggaccacgccggagaaaaagccttccatccgggagcggctggaggacgcaaagcgggagtgtgggtcgcgaaaaggcccggacaagcccaccccgcagaaggagcccccggagctgggcgacttatgagccggagcaagaaatggcgtctggaatgggcgttcttcctgggcgagaacggcaggcgtcagtataacaagctctgcaaaggctgcgcccatccctgcaagcagagtttccggacagtagtagtgtcctgcccgtactatctttcccgccgttccaaaaaacgcaggaattagggttcaaaataggcgaagaaaccgcctgtggcggcttttctgtgtaggggcagtatgatttcccatgtggggcggtaaggcatttctgcacagggaaaacgttcgtatttcacctttttcaaacagaaaggctcgctgccatcggatgttgtccggtggcggcgagcccttttttatattttgattcttggctgaactttgtcccgttctctttccacagctttcaattttacattattacgtaattggttgtacaaatcgatgttttcttcagactcatatgcaaaagttacgcataatgcataagattgaggctgctcttgttgagcatatttaaaccgctctttgcccgatattaatatgtatatatatggttcatcattaccaggccataggaggtcagcaccgcccgtaggactcttttgccaacgtctctgttgcagggttgatttctgtacagtatcataaccagggataaagtctttaattttgtattcatcaggaagcttcttaaaatcatcttctgtatctgtaccagcttctcttttggccttatatttgattagcgtatcctcatcaatcctacgaaaaatctcaatccacaaattattggctaagtattctttcctgcttattcttgttacagggttatatgccaaactaacagtaatcgattttgccgctcgaactttgagaaactgtttgggtacaggtatcttataaagatgaaaatctcgtaacggaagtctatcttctgcaaaaagtgtaacatggttatccgtcgaagtaagtatctgttctgaaattttcccatacccgtataaacgcataaatcgatcatgttttggattatcttttccagtataatctgcgtctttcgacatttcgccccaggtttgcatatcattagagcacttagctgaatttgcaagcagcgctcgaattaaatttgctgaaggccttccatcaatttgagcttccaaaatgcgttctagccgggccgcaatatgagtaacatgtggagcagcaaagcttgttccacaatatcctttaaagactcgatcattagtatggttcaaagtaggttccataagattctgatctgtctttagccaccggctggcccctctcgatatttgtcgaagtgaaaaattacctccgtaatcaacaaaatcaggcttgatagatttgttgacaccttttccgatccttgtaaataccgagggatggtcttttaaacctacagagatgggattaattccagtacctcgtaaaactgctggctcagaagaacgtgatattgatccaacggtaacgctaagagcagaagtagcaggatcaatcagacgatggtcttgagcaaatagctgatcgcgaactttttccatcgcttcttctcgggattcaaattctggtatttcaggatcggaaacatttccggcgctcacaataattacaatatctaattcccgtgctagatcatccaacatgctcgcccaactcaattggcgtccgccattatacatgctacctgcatcgcccgccgaaagattaaagatgcggcatccatacgtttcatagaaatatacaatagcatctctaacaagtctttcaggacgaacatcttctcggaaatagggatcgccatcttcatcatgcatgattttagcactacagattcgtactaagggtgtaaaaattctgctttcgtcgggggtggaaaagtcaccatacactactatgccagcaacaccagttccatgaccgttcatatctgctgttgtgtgttccgtagtatcaaaatcttcttctgcaacgactacagatttaagcaaaggatttcctgtaaaaataccagaatccagtacagtagcaagcggcgccgtttcgtcaagtgtatcatttacaatagggacataatcatattgataaagttcgtggggctcctgggtaactatctccgcaggtaattcaattgaggatataatatccatgctaagcagtgcatttaaggaaaactcattaaccttggcgcgccccagtagcaaaccagaaatcgcaaacagatcacctagcaattgactgccttgagtgcctaaaacgcttcggatttgcctctcagtcgacaatatttccgaaggattgttattataccagacatcaatattaactataaaaaaccccatgtcttttgggattgcctttataaaatctttaagatgcggtcccattctgtcctcgggagttaaacttcggacagcatctatacaggaaaacaaattacggcgttgtgcatgcgttaaaagaacttcatcgggtaaatcatcttcccaaagagcgcgttcggcattaaattgggctattgcctcttgatcctcaaattgcactatcaatttcgattgatttgatccaggttctgccgtttcttcaactagagacaacctaaatttattaattagcagttccagaaggtcacccgataaagcttctccagatagttccaacaccatcagtttatctgtttgaattccaatgttctttctggaatcaagaacattttttgatgcttgagagatttcttctgatagtttttgcccatgccgctttctatcacgaactggaggttttggggctgcagggttaggccgaccgcggtaggtagagacggtctcttgacgctcaatttgaatatgatcataatttgccatctcataaccccccttagttaatattggcttcttctcaaagaaactaatttcttttgtttttcgactgcaaattcaatgtcttttttgctatatgttcgtttcccattaaggatgcaccctcgcattattgttttacatatattttcgacatccgcataagaaaacgaattggtttcattcaaaaaggactcgaatacatgcgctggcccattaaattgttttagccgcaaaataaaaaggtttagcttttcttcgtttgacggcaaatcaaatttaatcgtatcatcaaatctgcgccatattgcataatccaaggactgttcaaagtttgttgcagcaataataattgagcgtcccctaaagcaatcaatttgctgtaaaaaagtattgaccactcgtttgatttcgccgtgctcacttgtgtcgctcctacttctgcctatcgcatcaaactcatcaaacaatatcacgaaactatcgctttttgccagatcaaaaacttttctaatattactagcggtttctcccaaatacgacgatactaatgcgtcaaatcttacatacattaatggaattccaatttcagccgcaagcacatttgcgcacaatgtctttccacagccaggagggccataaaaaagtagtttatttattggtgcaactccgttgctaattaagatatcccaattctgaaattcttttattacttccgacagttgaagcattttctcttgtggaagaataacatcatcaaaatatttatcgggatatataatctcaactagccgttcttctttgcctgatttggacaaatatgtgggtttcattgtggacatcgagtgtccaaaactcttctgtgcaccgttaagaaccatttccaagtcatctgctaaaattgcatggttcttttttcgctcatctgcaataatctcatgagcggttttcaaaaatgattctctatcattattattaaagctactaaatagctttttcaacaaatctgccctcgccatggtagcgtctcctttccaaattgcaatcagaatcgaataaagcagttagtatttactgagttccattatgatcatttcctcgataccattctttttgcaatattcgagaagtcgcatttttgccagtacactaggctcagtacgtccattttcccatcgatttattgtggagaaactcacatttagttctctagcaaactgctcttgagtatattttttttgctttcggatagattttaaaatttcagaaaagggcatgtgagtacacctccgttactgtaaattatagcatgtgctatagcagacgacaagtatcaacgtaaatatttacaacatatactccttgcttttttgaagatttttgtgtgagggtagtaataaatctacatttctatggagcatatcatattccttttcttcctgctgtattttacgaagttccgcttgcagggcggtcttgcaggaggagagttcatccagttctgctttcagcttcttggcggaaggaagtttggtgatcccggcctccttgatgtccctggccgccgcctcaaataagatgatctcactctcaaacccacgcaggaatttttccttgtcctttgacattttgtaacggtcatagataggcttcagtttgcggtaggtgtcaatctgtttgcccaggagggcaaggtcggtgagctgctgttccacatcccgcaggctttcccttgtgcggatggtggcggcggcaatggcgtcgcaccgttccttcaattcctcataactgtcgatgccgtgttcggtaagaaagttcatggtggcggccgcacgtttcagattctcaatggtcgcccaccgttggtatccggcgctctgctgggccttgatattattctgaatgtcaatgagcaggctgaccttcccgctgcgctgctggggctgtctggaggggcggatgcctccggcaatgcgggagacaacggcttcttccgtgtaatcggcacccagggttttgagccgggtaaacctctcctgagccggtgccctggcggagatatactttccccgcttgatctcgtatccttcccgctgcaaccgggcaagcaaatcgtctatgctggtggacacgggaatcagccggtcaatgacggctttcagctttgccttatagctagtgccgttctgtacggcctgatgctcaatatagctcttgcccttgtcccggccagggacgatgacggataggccgtgttctcggcacaaacggtcgctggcccggcgtatttcgtgatagctacgcttgttggaatgatagtgcttgtggtcggtgaagctgaccgcattgaaaatcagatgattgtgaatatgtcccttgtcaatatgggtggtaagtacaaactcgtacttaccatccaatattttttttgccaactgcaaccctatttcatgggcttcctctggcgatacctccccaggctcaaaggcttgaatcaggtggcggcccaggtgcgtgcctttgtcaatggcatggcggcgtgtccattcaaattcaatgtcggcggtctcggcggcgcagccaaaggaggacaccagcagcttcccgtccgtcttgtcgggattgcagatatagtcaatggccgctttcagcgttgacttaataggatgcgtctttgtaactgccatatctgatccagcctttcccggatttcttccatgtcggcctgataggtaggtcctccggcgttgacccgtttggcgatctgattgatgttccggccaatggcggacaggagtttgtttatctccttgatgtccctggtgtccacatagatgatatatccgtcgattgccatcttccgcaagtaggcaccgatccgctttgtctggagctgggccattttctgctcaatcaggctccgttcttctgccgtcaccggacagcgcaggatgatggggcgttttcgatttaccatagggtggcaccgtcctttctgcataagggtttggggctatcccaacaagcaattttgtatttagggggaaggggttccctaaagcaaaattcgcaagtgtggccacacttgctgtgcttgctctacgctccttcccccgtaaatacaatgccggaaccaccttcgtctgcccacaaaatcccggattttttcaaaagaaaagggcggcagagccgcccagaggaaacgaaaacggaggatactttcacacaccctccgtttcgtttgctgattctttagttttaagcgccccgtcaagcgcaccctcgatgatggtcaaatactgctctggacaaagtttcagtttgtggctgatacgctgtctctgtgcgctttcctcccgcatgacctctggattgaagtaccgttccacgggaagtccgcacactttgataagctgtatgataaccggcaagctaggaatcgtaccttcgttctcgatatttgcgagataccgggagtcgatgttaacgatctctgccaatgtcttgcgcgatagatgctttgcgctccgagcggcttttacatcggcaccgaaagtttcaaaaccggggcaatcttcaatattcgccatatagcatcacccacttacattgtatatttcatattttgtctgtggaatgttgctatatgctttattactacattttatttttcatactcatttcttgcacatgggcaagcgctatgatataattacaatgtttaagagcggaaagaagtggtattaatgacaaagctcaacgaagaatggctccatgcaaagccagtagattgcgacatttgcatggagtaaaaattgtcgcaaaatgaatatgctggctttgctacttgacaatcatctcaaggaggaagcctgcatgaaatacatcaatgcaaaagatcttcttcccgatgcgctagtcaaggagttgcaaagctatgtgcaagggggctatctttatgtcccgtctgatcaagcgcagcaaaaacgatggggagaagcttcgggctaccggcaggaattgcaacaacgcaaccgccaaatcgtagaggagtttcagaacggaacctctatggaggcgttagcggaaaaatacttcttgtccgtatcggccattcgtaaaatcatttatcagaaatgaaccggcgggggttgcagaaatgcaaccccgctttttgtttgatacagattgattcggtattgtctagtggatagaaaagtgtttgcatcggcagtacgataaaataacaaatacatcacaagaaaggaaaaaactatgtgtactcgatttgtctaccgaggtgatgatataatcaccggcttcaattttgagattgaccttgccgtgtggaatcacaaaatcataacagaaaaagaccgcttttatatcggcatcctgcggcccgatgggatgcgtcattcctatcatggcgtgaaccgcaacggaaatgtcggaaccttgttgtatgttcacggaaacccggagggggcctatcaggatttcaaaggttgcatgacaatcgcagacctgacagaacagtttgtgcaggcaaaaatcagttttgacgatgcactgcagatcgtgcaggaacagaagatcgtctatgccccggatgccaccatgcaggccatgttgtccgaccagcaggggcgtaccctgatcgttgaaccgggtattggctggcgggaaggcgatggacgctactcgctgattaccaattactctatccttgcacccgaaagcacaatgccctttcttgtgccgggagatgatcgatacgaaaggactgctcaacttctaaacacttacggaaagcagtttactgtcagcgatgcgttttctgtacttcaagccgtccggcaggaaggaatctgggccactagagtttcttttgtttattcggccaaggaacacgctgtttactatgtggagaacaaccatttttcactgattaagagatatgagttctcataacttcgagaggagggaaagtcatgaatccagagaacatttatcctcgcaccaacgaccacgaaaccgtttatctgaaaaatgtcatcaaaaattccaacatccttgtcggggactttaccatgtataacgacttcgtctatgatccgcggcagtttgagaagaacaatgtactgtatcactatccgatcaaccatgacaaacttatcatcggaaaattttgttccatcgcctgcggagcaaagtttttgtttactagtgccaatcatacgcaaatgtcgctatctacctttccatttcctatctttttgaggaatggggattggatgtccaaaacataacgagtgcatgggacaataaaggcgatattattatcggcaacgatgtttggattggatatgaggcagtgattttgtctggtgttaccattggggatggagcaattattggtacccgcgctgtcgttacaaaagatgttcccccttatacgattgtcggtggcgttcccgctaagacaatccgaaaacgcttttcagataatgatatagatacattattaaaaatgaaatggtgggactggccggttgaacaaatccagagtcatattactgaaattcaatcagggagaattgcggatttaagaaaactgttctcttgactttgagagttttattttgatttggctacattcagtgtatgcgccttgacttttgctattattgatagtactattgttaatagtaaaagttggaggtgtcgttatgtcgtcgattgatttagtcatacttggtattgtactggagaaaccgcaaagcgcctatgacattcagaaggatgtggagtaccaccatttttcccgctggacaaaaataagcgtaccttctatttatcgtaaggtccttcagttgagcgagaaggggtatctccaaagcgatattgtcaaaggtgataagtttgcggacaaggccatctattctattaccgatcggggcagagcgtatttcaaggagctgatggcctcttgcgccgctggcccggtgcccctattattcgatttcaatgtagtcattaccaatttgaacaagatggacaaagccgaagcagtggagctggtttcggcattgcgccagagcatacagtcctcggctgaattgaacgagggctatgcgcgggaatttgcagacattcccttggatgggagaacgatttttgaacagcagcagcttctctatcgtgctcttttggaatggctggatcactttgaagggcagttcttggaagaatgagtacaagctcccaaagcagtttgaccatcctgtttgaagctccattttggatcggtctatacgaaagaacggataacggtaagtacgaggtatgcaaaattactttcggctcagagcccaaagattacgaggtctatgagtttctgttgaagaattggcacaagctgaaattcagtcctccaatccaggccgagatagccatagagcgaaaaatcaatcccaaacgtatgcagcgcgaaattcaaagccaactgcaggataaaggcattggaacaaaggcgcagcaggcgttgaaactccagcatgagcaatgtaagctggaacggaaagccaagagccgtgagcagaaagagacggagaaagaccgccagtttgccatacggcaggaaaagaagaaagccaagcacagaggaagataacatgaagatagaatggattttatgccccttttgcggcagcaaaacgcgattgaaaatccgcgatgatacagttctggaaaactttccgctgtattgcccaaaatgcaaacatgaaaccttgatcgcggtaagacaactgaatctatccatcatccaagagccagacgctaagacgcagagccgataacactgaggaaaaacctcataggttatcggctctgtttttatatcctctatgatctgcccggcggcagaaaagaaaaaaaccgccgcggggcagacggctttctatgcgcaaaagagcacttgattcacggcggttcgattcgagccgccgtttttctttgtccagacagctcacacggcggcataaaagggggatgccgccatgctgcgccggatgctgtcaccgcctgatctgacaaaggttagccgctcaaaaaaagctcgttccagtcggcggagatgttcggccatgagtatgaactataccatgtaaataatctgcatatcacttgctattgtgcccggtgggtctgtgacctgccgggcgctttttgtcgtttcctgcggtcgggctggctggccattgcttttctcaaattttcttcaaaaaggaggcgtttagcgggcagaacacgctctcgcaggattggtagtagcggaaagggagagaaccacctgatcccccatggaaagggggtgaaactgatggaatctaacccccgcgactatggcgagcaatgccggttcgatgctttttgcaagaaggtattgcgaaacgaggccagagcctacctgcggaacatgaaacgccaaagagagcgtgaagccttctttagcgacttgtcccaggcggaactggacaagctctgtgtcatggatcgttaccccagcgacagcattgtgttctcgtcgcacggctacgatctacatatcgacaacgagcttgtagccgaggcttttgccgctttgccgcagatggagcagagcattttgattttgcactgcaccctggacctggcagacggtgagatcggcaatctcgttgggatgtcccggagcgccgttcagcggcaccggacgagggcgctgcaggagctgcgtgaaacattgtcggcgctgatgccgaaaggaggctgaggaagatgacagagcccatccacaagggaaaggacctgccgtccgtttgggtgatccacgcggcctccggcggtgacagcgaggccatggagcaagtgctgcggtactacgacgactatatgagccgcctgtgtacccgtactctctatgacaaggacggaacccctcatgtgtgcgtggatacccacatgaagcgctgtctggaaatccgactgatccgggccgtgatgcgcgcctgatcctttcagccctggcagaaggcaagcggcttaccctttcctcctttgccgatgccggggactgaccccaccttgacaaagaaagccttcgggcagcataaggcagacggatacgatctgtctgtgtggagccggtcggccggtgcgccatgaccctgttgcaagtccgcaggacgggacccctaccaaacaggtgagcgacaaaaccaggccgcgaaacaggcgtggcagtctgtgggcgaggatacacagacaggataatgagactcccgcgttgaacgccctcaaagcattgcgcggcgcacccatcagcatgggccggggtgagattcccgtggagctgcggccagcagccatccgtttttttgcctcttttattttcagataaatcttctgcttttctgtttacggataattcgtaaactttccattagcagcagacaaacccgaagcggcgcggtacaatgagggtggaagttatgaatgaacacccttttgcgtgccgtttctgactggaaaggaggctgctgtgtcagaaattcagaacggtacggagagaaggcctttggagtgccggacctatacggtcaacgagattgcccgtatattaggcgtcagccaggcacgggcatatagacttgtgcaggagggccttttcaaaagcgtacgaattggcaacgccatacgaatttccaagcggtcgttcgaccactggctggagtcacttgacctgtgacacaagaaaggaaggttcgttatggcatccattatcaaaagaaagaaaaactattccatcgtctacacttatgtggacgagaacggtgagaccaagcagaagtgggaaacccgcacttcctatcaggaggcattgaagcgtaaggcggagattgagagccagaaaagctccaactctttcctgccgcccaccaatcagaatattgcggagttcctgtccgacttcgtctccctctatggcgaaaagcggtggggcgtgtccatgtatgacagccaaaactcgctgattgccaactacatcaaccccatcatcggggatatgaaggtgcaggacatcaccacgcgggtggtggataagtacatccagactttgcagaaaacccctgcggtgaacaccaggacgcaccacgccaaaacggagtttgtcaccaacgccactattgagaagattattaagctcctccgctgtgccttcaagcaggcggttcggtgggaactggttgccaagaatccctttgacaatgtggtgctgcccaaagtggaatacaagaagcgggacatctggaccgccgatatgatccgcgccgccctggatcagtgtacggacagcaagctctatgtggctatgaacctctcttttgcctgctcgttgcgtatgggcgagattctgggactgacctggagcaatgtccacatctccgatgaagaaatcgctgatgacaatgcctatgtctacatcgacaaggagctggcgcgggcctccaagcgggccattgagatgctgggacaaaaggacatctaccatgtgttcacgcctctgtttcccaataccagcaccaggatcatcctgaagaagcccaagaccgattccagcatccgtaaggtgtggctgcccaagaccctagcttacatcctgcgggaatggaaatccgcgcaagacgagttgcggtcgctgctccgtgacgagtatcaggacttcgatctggtggtggcacttcccaatggacggccctgcgaggatcggatcatcctcaaagagtttgcaaagctacgggagaaagcagggttgcccaaagtggtctttcactccctccgccattccagcaccacctataagctgaagctgaaccacggcgacctgaaggccactcagggcgataccggacacgcccagatcgacatgatcaccagcgtgtatgcccacattctggacgaggatcgcaagatcaatgcccagaagtttgagagcgccttctatgccaatcccgacctgcgttcggttcgtcccccggaggaaccaaaggaaccggcacccgccacattggatttggagtccctggtggaacagcttcgcaagtcgccggaactggccaacacactggctgcattgctggtgtcggccccatccgaaaaatagggcgggaaaatcgtattagcaaatcggcgttttttattagcaaggccggaaaaatagttcgaagccaattagcaggcatacagcggaaaatgtataaaatcgttccggcggagcggcaagaatactccgaagaaacgataacaaaaaaccgctgtaaaccaccgaaaaacggcttacagcggtcatttttggcacccccggctgggttcgaaccagtggcctgtcgcttaggaggcgaccgctctatccaactgagctacgggggcttatacagaaaatattcaattttacagggctccaggattcgaacgattcgatttttaggaggcggtcgctctatacgactgagctacaggggcatatcaaataggcagaaaccattgtacctgttttccgccctgctgtcaatgggaaagggctgccgcgcaggcggcagcccttcggcgctcactggatgacccgtacccggatcacattctccagcgccgtcacctcgtcgatgacgcactggtccgccggggcgctcaggtccacgatggtgtaggcgtagtccccccgggacttgttgctcaggttctccacattgatgccgtcccgggacagcagggtggtgatgctggccagcatggcaggcacgtttttgtggatcaggcacagccggcacacgccgctgcgctcctggctgacggcgggcaggtttacgctgttgcggatgttgccgttttccaagtaatcccgcagctggtccaccgccatgaccgcgcagttctgctcactctccggtgtggaggctcccaggtgaggcatggccagcacgtggggcgcacccaccaggcggttattggggaagtctgtgacataggccgctacccagccggtgtccagcgccgccagcatggcatcgtcgtccacgatctcgccccgggccaggttgatgaaccggacgccccgtttcatggcgccgatggccttggcgtcgatcatgcgctctgtgtccttggtgtagtggatgtggatggtgatatagtccgcccgcttgtagagctcgttgatgtccttcaccacatggatgtggcggtccagccgcagggcggcatccacagacaggaaggggtcgtagccgtacacatccatgcccagggacaatgcgatgttggcgaccaatgacccgatggcccccaggccgatgacgcccagcgtcttcttgtacagctccgggccgatgaaggcggccttgcccttctccactacggtggtcacgtccacgccggaggccacctgctgccggacccactggatgcccccgtccacgtcccgggagcccatcagcatggcgcacagcaccagctcctttacggcgttggcgttggcaccgggggtgttgaataccacgatgcccgcctcggagcagcggtccagggggatattgttgacgccggccccggcccgggagatggccagaaggtttttcggaaaatcatagtccagcagcttggcggagcggaccaggatggcgtcctcgtccgtctccgaatcggagacggcgtacagcgccggatccaggcggttcaggccgacgggagagatcttgttgaatgttctgatacggtacatggcagaatgcctccattgggcggccccagcgggtcgcggtacttgcgggggaacgtgcggtgctggcaccgcttccgccgcagcatcttctattataggtagaggccgccgtcccagtcaatgtgccgaaccgccaaatccacggccggttgggccgaaagtttttggagaggtattacttttggaacggcctgggaaaataccccaaaaggcagttctgcgcctccggaactgccgctttcctatgaaaactgcggaatcgtcctgtttttttgaaaaagcccctgaaagcagcttgcaaaaatcgagagaacggcatataatgcaaaactgtgtgcaaatctcgaccggcggccggaatcggacggccggcagggaggccgcgtgtgttgatccgccgcccggcgtaccccacgtggccccttcatagagaaaaggagatggaagatgtgcagaacgaacatttgaggaacatcgccatcaacgcccacatcgaccacggcaagactgccccacagggctgacaccctgcggggatcgtttgatagaaatgcccggcggaagcacccgcaaggggtacgccacatccgtaaggcgggaaagccgccaacggctgtgcagtgaattccgcctccgccaaggttttgccgcaggcaaaacacttgtacgcgccgcccggcgcggccttgccagagaagaaggagaagagaattatgcagaacgaacatttgagaaatgtcgccatcatcgcccacgtcgaccacggcaaaaccacgctggtggacgagatgctgaagcagggcggcgtctaccgggagaatcaggaggtggtggaccgggtcatggactccggcgacctggagcgggagcggggcatcaccatcctggccaagaacaccgccatccggtacaaggacaccaagatcaacatcgtggataccccgggccacgccgacttcggcggcgaggtggagcgcatcctgaagatggtcaacggcgtcatcctgctggtggacgccgccgagggccccatgccccagacccgcttcgtgctctccaaggccctggagctgggccaccgggtcattgtggtggtcaacaagatcgaccggcccgaccagcggatccacgaggtggtggatgaggtgctggagctgctgatggacctggatgccaccccggaacagttggattcccccatgctgttctgctccggccgcaacggcaccgcctcctactcccccgacgtgccgggcacggacctcaagcccctgtttgagaccattctggagtatatccccgccccggaggcagatgtggaccagcccttccagatgctggtcagctccatcgactacaacgacttcgtgggccggatcgccatcggccgcatcgagcggggcaccttgaagcagaaccaggacatcgtcgtgtgcaactaccacgacccggaggctgtgctccgtaaggcgagagccaccgccatctacgagttcgagggccttgcccggaatccggtgaccgagtccaccgccggcaacatcatcgccatgagcggcattcccgacatcaccatcggcgacaccatctgcgtcccggactgcgtggaggcgttgcccttcgtgaagatcagcgcccccaccctggagatgaccttctccgtcaacgactccccctttgccggcaaggagggcaagttcgtcacctcccgccagctgcgggaccggctgtaccgggagacgttgaaggacgtgtccctgcgtgtgaccgacacggacaaggagactgccttcaacgtggcgggccggggcgagatgtccctctccatcctcattgagaccatgcgccgggaggggtatgagttccaggtttcccccgcccgcgtgctgtaccaggagatcgacggcgtcaagtgcgaacccatcgagcggctggtggtggacgtgcccggcgactgtgtgggcgcggtcatcgagaagctgggtgcccgcaaggcggatctggtggagatgactcccgtgggcgagcggatgaagatcgagttcctgattcccgcccggggcctcttcggctaccgcagcgatttcctgacggacaccaagggcgagggcatcatggccagcgtgttcgactcctacgccccctacaagggcgacatctcccgccggggcaccggctccatgatctcctttgagaccggcgagtccgtcacctacggcctgttcaacgcccaggagcggggcaccctgttcatcgggcccggcgtgccggtgtacggcggcatggtgatcggcgtcagcccccggagcgaggacatcaccgtcaacatctgcaagaagaagcagctgaccaacatgcgggccagcggctccgacgaggcgctgcggctggtgccccccaagcagatgagcctggagcagtgtctggagttcctggcggacgacgagctgctggaggtcacccccaagagcctgcggatgcgcaaggccattctggaccacgagaagcgcatgaaggcgctgcatggcaagaagtaaaccggccattgcatgggccctggcccccgggagggggccggggcctgttcgtttgccgcccgggcaggaggcgggggctgttgggaaagaccgcgccgcatccgcaggggggcgatgatcccggcggcccggaggtggactgccccgcgggggaaaccagccgctccgggatgccgggccccgcaggctcgggtacagcgccctccgcggcgcctcaaaaatatttgttaaaaattctgccttggacgggaactttttcccgctgccctgcgtcagtacaggcaaacggagcagatgctcccccgaaagcattggaaaggatgaacgagaatgaaaaaacggattctgcaatgcctgtccctgatcctctgcgccgccatgctggcgatccccgccgcggccgcggagaccgctgacgaagaagcgcccgcccgcctgggccccgcggcctattggggcactgtcacctggatggatgaggacaccttcctgctggacagcgggaaggaggacggcctgggcgacgcggtggtggtccacgtgggggatgccccctacctggacgccgtcaccggcaacaccctgaacctggagacgctggaggacggggacgccgtctatgcctgggttggccccgccatggcgctgagcctgccgccccagtccacggccagcctgatcgtgggcaacatccccgccgactacgccgtgccccagtactatgagatcaccagctccaccgttacggaggagtccgcggtgctgcatgtggcgggcagcaatgacacgatcaccgtgcccgcctctgcaaagctgacgccctacctgacgaagaacattgtcaccctggccgatctgcgtcccggcgcccgcatcctggtgtggtccgattccaagggcacgccggagaaggtgctggtgttcgcctacggctatcggggctatatcagcgtggcggaggacggcgtcgtgtccgtcaacggccagtccacgactcagaaggccaagaccaccgctgacggcgacaccctgctgcccatccgggcggtggcggaggccctgggcatgagcgtccgctgggacgcgaagcagggcgccgtggtctcctatggcgatgacatggtgaagcctgcccccctgaccacggagacgctgatgaccgccatgcccggcggcgccatcgccgcggtgaacagcgacggcaccacggaggaggtctacggcacctgcgtgaaggaggccggtgtcacctatgtctcccgctccgcgctggcccaggcgctggacctgtatctggcggactgagtccggcacaacagaaaaaccgcgtatcagatccccggaggaaatttccaccggggatctgtaacgtttcgggggcgctgtgcgttaatttggtgaagggagggaggaccgtggactttgagattctctatcgcctgtatttccgggatgtctaccgttatgtccggggactctctcgggacgaacatctggcggaggagatcgcccaggagacctttgcccgggccctgggagcggtggaccggttcgacggccggggagacgtccgggcgtggctgttcaccatcgccagaaatgtctgggtggaccattgccgccggcaccggcgggagacggagctgccgggggaggatctgcccggcggcggagactttgccggggcgctggaggaccgggaggaggtcttggccctccacagaattctccacaccctgccggagccctataaagaggtgttcggcctgcgggtgttcggggagctgcccttccgggccatcggacaggtcttcggaaagacggagggctgggcccgtgtgacctactaccgggccaaaagccggatcttgagacaatgggaggcggagcgagatgaaagtgagctgtgacgtgatccgggacctgctgcccctgtatactgaccaggcggccagtgccgacacggtcgccctggtggaggagcacctggcgtcctgtcccgcctgccgggaggagctggggcgcttggggacagccctgccggcggagccggagggggtggagcccctgcggcgcttcaagcggcggtggcggcggaggcaggtcctcatcgccgtgacggcggcagtggtgacggcggcggtggcgggggggatcttcctgacctgcttctggggccgccgcgtggcggcgggggatgtggaggtctctctggaactgcaatggtcaggcctcacttccggggaggattccggaggagacgggagccggggagagctggaacaggggaactggagcggcgtgatacatgtctgctcatcgcatgagaagaacctgcggtccagaatagagcctttttcagagacagacgaaaatggagtcatcgttcgggcgggctatgtcatagacatgtgggaggtgccggaccgggctcccagtggctcgggctcgatcaccgccggctatggctatcccaatgaggcggggccgatcccagaggactttgatatcgtctttattgtccgctaccgggatggagaagtcacttactccgtccgggagatgggactactggacccggcggggtgagaaaaacttgcgggagcagaatggcggcggggcttgtccacgccgctgtttcccgttataatggaggcaacgatttttcgatcagggggaattggaccatgaacacccgcatcgaacacgacaccatgggcgagattgctgtcccggcggagcatcactggggcgcccagacccagcggagcctggaaaacttcaagatcggcggccagcgccagccgcaggagatcatcaccgcctttgcctatttgaaggaggcctgtgcccaggccaacgcggactgcggcaagctgacggcggagcaggccggggccatcgccgccgtgtgcgccgagatccgggcggggaggtggaatgacgagttccccctggtggtgtggcagaccggcagcggcacccagaccaacatgaacgtcaacgaggtcattgcccacctagctgcggaccgggggatgcggcttcaccccaatgaccacgtgaatgcctcccagtccagcaacgacacgttcccctccgctctccacatcgcggcggccctgagcgtcacggagcaggtgctgccagcggcggagcggctggcaggggccttccggaggctggaggaggcctatccggacctgatccgcattggccggacccacctgcaggacgccacgcccctgaaattcgcccaggaggtctccggctggcgggagctggtggaggccccctgccggatgctgcgcaccgccctgccggagctgaccaaactggccatcggcggcaccgccgtgggcaccggcctcaacgcccccaaggggtacgacgagatggtgtgcgggcggcttcgggccatgaccggggtggacttcaccccggatgccaacaaattccacgcactgaccagcaaggatgccctggtgttcgcccacggggcgctgaaggccctggccgccaacctcatgaagatcgccaacgacatccggttcgaggccagcggtccccggtgcggcatgggagagctgaacatcccggagaatgagcccggcagctccatcatgcccggcaaggtgaacccaacccagtgcgaggccgtcaccatggcggccgtgcaggtgatggggaacgacgcggccatcggctttgccgccagccagggaaacttccagctgaatgtgtttctgccggtgagcgcctataactttctgctctccgcccggctgctgggggatgtgtgcgattccttccgggtccactgcgtggagggcatcacccctaatgtggagcggatgacggccaacctgcacaactccctgatgctggtgacctgcctgacgccgaggatcggctacgaggcagcggcggcgtgcgccaagaaggcccttcacgacggcactaccctgaaagaggcggtgctggccctggggtatctgacggggccggaattcgacgagacggtacggccggagaaaatggtataagagaagagtatcccgccggggacgaaaagattcgctcccggtgggatactctgcgtttccgggacgtttaccggacgggggggatgcgcccccaagagagaagaggaggcgagcgcgttgctttccatgctgctggctatgctggagacggaggaggaccgggaaaggtttttgaagctccatgggacctatgagaagaagctatacgccgtggcggtccgtgttctgggggaccggaccgcggcggaggacgcggtgcagcagacttggctgcagctcatccggcggtgggaccgggtgagcggcctggcctggagcgagacggagggatatctagtgaccgctgtgaagaacgcggcggtggacatgctgcggaaggagcggtgggaggaagctctgccggaggactgggatccgcccgctccggagacgggggagacggactaccgctatctggtgagcctgatccgggcgctgccggagagctaccggcgggtgctggagctgaagtgcgtggaggaggagagcaaccgggagatcgcccggcggctggggctgaaggagtccaccgtggccacccgcgtcctgcgggggcggaccatgctggcggcggcgctggagaaggaggggtacgtccatggatgagcggatgctgcgccatgccctgatggaggccaacctggagcggttccgggacgtgctggacgcggcggaggaaccggactggtcccaccggtatttgagaaaccggacgcggctgctggcggatcccttcggctgggcgaagcggatggcccggccggtgtggaagcgggcggcccggacagcggcctgcgtgctattggcatgcctggtgaccctggggggcctgatggcggtgagccccgccgtccgggcggcggtgttggggtggttccatcaggtgcaggaggatctggtgacctttatcaacccgaagcggaccgtggcagaggatccgcccggcggctggcggctgtcggagatcccggagggctttgtgctgacggacgtgagtcccaaggagagctcgggctattggaggtactatgagccggggaccggcgcatggctgtggtttgccgtctacacgccggaggcgggagaggtagctaccaatgtggacggagcctcggacgcgggggaaaaccacaccaccgtcactgtgcaggggtaccaggcagacctcttccagtcggaggggacaatcctgctgacctggcagaacgaggcgggatacctctttatgctgcgggccacggattttggcgacaccgagaccctgctgtccatggcggaaggcgtggtgccttacgagggacccggtgtggcctgggagatgggctgggtgccggagggctatgaacccatgtaccgggatgaaggcgctggagccgtccagcaggtgtgggtcagggacgggacaacactgacctggcagtatgtcactgaccccatctgccccttcgagaccccggagggggagccggaggagatcgacctgcggggcgtcaccggctggtactggacggcggaggaggagccggaggagagcgatggccccaccattactgtgaatggggaggagattcaggcggagggctcctccgtcaccgtaggcggcgtcaccatcatcaccggcggctccccggacacagaggagaccggcactctgatctggacggacccggacaccaacacgaccttcttcctggagggggccctggaccgctttgacctgcgggacatggctgtccgtacggaggagacggagccgcagctctcacctcccacgaagagagcgcagtcgatcaccggcactgccggcggtgggaagtgaaacagtcagactccacagaaagagacgagatctttgtgatttttgacaaagatagaaaagtccgtggatacgtcctgcccacggcacgttcaactaatagaacggccgggggcctgtcccccggaaacacacggagacagaaaggaaggagttccatgaaaagacgagtcctatcattcctggccggcgcggccgcggcgttggcgctgacggccctgaccgccaccgctctggcggcctccgggcaggtgcagttcaacttcgctggggtggctctgaacggcgagacaaagatcgccgccggcagcgacatcaccgcccccaacggccagcgggtccccggctccatcctctatgtggatgaggctggcggcaagaccaactacctgcccatccggaccatcagcgagctgctgggggtgaaggtgggctacgactccgccacccgcacggtgctgctgggggagcagaccgagccggcctccgcagccgtcgcttcagggctctactggcacagggagaccgatgaggacggcgtcacatacgccagcgaggaccctgggatcgactacaccgaagcccctggctacgcgctgacaaagctgccggagggctgggagctggagtccgtgcgggccggaatgggcggcagagggaatctgagctactggaatggcggcgggcgcatctccttctcctgtgcctatcccgacggcgggagctatggctggagccccggcagcggggagatcccctgccgcaccgtcaccgtgaacggccatgacgcggcgctctacacctacagcagcgaatacggcgacagctgcctgctggtgtgggaggacgaagcgggggtgctgttctggttcaccgggtcggacgtggacccggacacgctggtggaggccgcctcctccgtggagcccacatcaaagactgcgcccgcttgtgaggctgactggctgcccggcggctacagctggtttgaaaccaacgcctccggcggcgcggcggagactacctgggtcggccagggcggcaatatcaccctgacctgctctgccacccccttgctgatgccggagggagatggagagaccgtgcgcttcggcggtgtgaccgccaggttctgggaggcggagaagcctcacgaggcggagacggatgcgtgggagcctgagacggtgggcggcgtgattatctcgtctggcaccatctccggcccccaggcagcggatgtggccaccctggcctggacggacggcggcctgaacttccgcctccacggcactgtggatcaggagaatctgctccatgtggcggagagcctgcggatcaagtgaagatcggacggcactcataaaagcagccccggcgtgcaaagcacgccggggcttttctgtcagcagctctggccgcagctacaggtgaagcgggtcgtgacataccgccgcaaaaagcagaggatgccgcctgccatcagggccaggaaggcgcagcaaagcgccgcgccgatgtggagccccacgccggaggcggtggagagggcggtaatcagcgccgtcagcagcgcccccagggcgcccacagcggaggcctccccgcagcagagccaggcgtccgccagggccggcgtgcggtctgccagcaggccgcccagcagataggccagcaggccgccaagaccggcggcagcggtggccgcgaaaaagaacagagccgtgggcgtggcggccgtcagggtcagcacgtccgtgcgcagcagggcgaacaccaggccgcccacagccagggaccccagcaccagggtcagaagataacagaagcagcgtttcataggaccagcctttctatcaaaacgcgcaggtccgcccggcggggcgaccgccccgcagtccagcctatgcgctgggtgcggagattgtgtgagcgagtgtatatattcatatttttttgaatatcgaaataaatatacggttttctaagacgttcatcgaaattttatgcaaaaatgcgcggaagaagctggaaatgttgtgcaaaatgatgcttgaataaatatgcgtgaaagatgtataatccaaacatcatcaatcaaaactccacggagggaattcattatggatcagaaaaacatcaagaagatcgtgctggcctattccggcggactggatacatccatcatcatcccctggctgaaggaacactacaacaaccccgagatcatcgccgtatccggtgacgtaggccagaacgacgagctggaggggctggaggagaaggccatcaagaccggcgccagcaagctgtacatcgcggacctcaccgacgagatggtggacgaggtcatcatcccctccctgaagatgggcgccagctatgagcagtatctgctgggcacggcctttgcaagacccatcattgccaagaagctggtggagatcgccaaggcggagggcgccgacgccatcgcccacggctgcaccggcaagggcaacgaccaggtgcggtttgagctggccatcaagcggttcgccccggatatgcccatcatcgccccctggcgggagtgggacatcaagggccgtgacgaggagatcgactacgccgaggcccacaacgtacccctgaagatcagccgggagaccaactactccaaggacaagaacctatggcacctgagccacgagggcctggacctggaggacccggccaacgagccccagtatgagaagcccggcttcctggagatgagcgtcagccccatcgctgcccccgacaagcccacctacgtgaccatcgactttgaaaagggcgtgcccgtggcggtggacggggagaagatgaaggccagcgacgtgatccgcaagctgaacaagctgggcggcgagaacggcatcggcctgctggacatcgtggagaaccggctggtgggcatgaaggaccggggcgtgtacgagacccccggcggcaccatcctctacaaggcccaccagtgcctggagatgattaccatcgacaaggataccgcccacatgaagagcaagctggcggtggacttcgcggacctggtgtacaacggcaagtggttcacccccctgcgggaggccctcagcgccttcgctgacaagacccaggagcacgtcaccggcagcgtgaagctgaagctgtataagggcaacatgataacggcctctatcacctcgcccgagtctctgtactccgaggaactggtgaccttcaacgagagcagctatgaccagaccaacgccaccggcttcatcaacctgtggggcctgcccgacacagtgctggcactgcgggagcaggggaagctctgagagatttcggaggggagcgggctcccctccgagccgccccaccaccagtcctcagactggtgaacgctgcccagggcggctggggcaaagtattttcggcaggtacacgccctgccgaaaatgttttcaatatgcccggcggggagaggcaagaccattacaagaccacaggggcggggcggagaggcttcttcgccctgcgtctgccatgaaaggaacaacagcttatgaaactctggggcggacgctttcaaaaagacaccgacctgctggtgaatgaactcaacgcctccatcagctttgaccagcggctgtacagggaggacattaccggctccatggcccacgccgccatgctggcggactgcggcatcatctccaaagaggacgccgccgccatcaccagcggtctggaggacattctggcagacatcgaggcggggaaggcggcattcaccgccgacaacgaggacatccacatgaacgtggaggccctgctcaccgcccggatcggcgacgcggggaagcggctccacactgcccgcagccgcaatgaccaggtggccctggacttccggatgtatgtccgggagcagatccccgtcatcgtggggcagctgctggagctggagacggtcctctgccgtcaggcgaagaagcaccagaccgccgtgatgcccggctacacccatctccagcgggcgcagcccatctcctttgcccagcatctgatggcctatgccgccatgttccgccgggacgtgacccggctggaggactgcggggcccggctggacgagtgtcccctgggatccggcgccctggcgggcacaacctatcccatcgaccggtgggagacggcaaaggccctgggcttcgccgcacccatgggcaactccctggacggcgtcagcgaccgggactacgcgctggagcttttgagcggcctgtccattttgatgatgcacctgagccgcttcgccgaggaggtcatcctctggtgcagctgggagttcaagttcatcgagctggacgacgcctatgccactggctcctccatcatgccccagaagaagaacccggacgtggcggagctggtccggggcaagacgggccgggtctacggcgacctgatgagcctgctgaccgtcatgaagggcctgcctctggcatacaacaaggacatgcaggaggacaaggagccggtgttcgacgccgtggacacggtggagatgtgcctgccggtgttcgccgccatgctggacaccatgaccgtccggacggacaatatgcggaaggccgccggccacggcttcatcaacgccaccgactgcgccgactacctgacgaaaaaggggatgcccttccgggacgcctacaccgtcaccggccatctggtggcccagtgcacggcccggggcaagacattggaggaactgacgctggaggagctgaaggctgtctccgagctcttcgaggcggacgtgtatgacgcgctgaacctggagaactgtatggccctgcggagcagctacggcggcccggcggtggcggagaccgcaaggcagatcggggagatcgaacagttcattcagaagatcaaagagaacagataaaaggataaaagataggcagatccggtaatatctcttatcccttatcttcactggggtgatgatatgaaaccaaaggtctacatcgacggaaaggacggcaccaccggcctgcaaatctatgaccggctggcggcgcgggatgacatcggcctgctgctgatcgacgaggcgaagcggaaggacccgggcgaacggaaacggctgatggcggaagcggacatcgtgtttttgtgcctgccggacgcggcggctgtggaggccgtggccctggcggagggctccggcgcccggatgatcgacgcatccaccgcccaccggacggcgccgggctgggtctacggcttcccggagctgcggcccggccagcgggaggccatcgcgggggcccgatatgtggccaaccccggctgccacgccacggggttcatctccattgtcgcgccgctggttcaggcggggctactgtccgcggacgcggacctgtgctgcttctccctcaccggctactccggcggcgggaagaaaatgatcgcccagtacgaggcggcggagaaggcagagagcctttacagccccggcctctacggcctgacccaggcccacaagcacctgccggagatgcagaagctctgcggcctgaaaaagcccccggtgttcacgcccatcgtggatgactactacaagggcatggctgccacagtgcccctgcacaggagtcagctgacgggggaggccaccctccatcaggtgtggcaggcgctggcggaccactacgccggggaaaagctggtccatgtggccccggaggggagcgcggacgcaggatccaagctgtacggcaacgccagagccggggacaacggcctgaccctggtggcggcgggaaatgacgagcgattcaccatcaccgccctgttcgataacctggggaaaggggcctccggcgcggcggtgcagaacatgaacattatgctgggatttgaggagaccgctggactgctgtgaggcaaaagtgaagaaaagagataagggataggcgcgccctgattttggcgggggagagatgtcccttatctgttgaagagaggatgatacgatgctgaacttcatcaccggcggcgtgtgcgccgcccagggcttccgggccgggggcatccacgtgggggtcaagacccacgcggcctggaaaaaggacgtggcgctgatcgtgtccgacgaggactgcgcctgcgccgccgtgtatacgaaaaacgccgtgaaggccgcccacatccatgtggacaagcgccatctggcggacggaaaggcccgggctgccgttatcaacagcggcaacgccaacgcctgcgcccccatgggagaggaaaacgcggagcgggtctgcgcggcggcaggcaaggccctgggctgccggccggaggatgtggtggtagccgccaccggcgtcatcggtcagacgctgaacgtggcggtcatcgagcaggggatgccggagctgtgcgcggcggcggcccacacggcggcgggcagcgacgcggccgcccacgccatcatgaccacggacaccgtcaagaaggagctggcagtggagaccgttatcggcggcaagaccgtccggatgggcggcatcgccaagggttccggcatgatccaccccaacatgggcaccatgctgtgcttcctgaccaccgactgcgccatctcctcggagatgatcaagtccgccctgctggagaccgttcaggccagcttcaaccgcatcagcgtggacggagacacctccaccaacgacacgtgctgcgtcctggccaacggcttggcggggaaccctgtcatcacggagaaggggccggattacgacgcctttgtggaggccctgcgcgccctgtgtgtggagctggcgaaaaagatggcctccgacggggagggcgctacccacctcatcacctgcaccgtcaccggagccgggagcgagcagagtgctgagaccgtcgccaaatccgtgatcggctccgccctcaccaaggcggccatcttcggtgcggacgccaactggggccgggtgctgtgcgccatgggctattccggggaggacttcaatccggacaaggtggatgtggccttccagagtcaggcgggcagcgtccaggtgtgcgctaagggccgggggctggattttgatgaagatctggccaagagggtcctgacggagcacgatgtcaccattgccatcaccatgggcgagggagatagcagctgcacctgctgggggtgcgacctcacctatgagtatgtgaagatcaacggggattaccggacgtaaaccgggatgcccgatagtgcccttgcggggagcggagatgggccgctgtccggcggcctatccgcaccccgtagcgggtgcatctgtccagtcatcatagctgccattcccgcgtcccatgggacacctcctccccctccggcggaatcccgccgattttcaagaaaagagttgatgttacgatgtcctcccacgcacagcaagcgcggacgcttgtggaagccctgccctatatccagaaattcaccggcaagaccatcgtggtcaagtacggcggcaacgccatggtgtccgacgaactccgccgggctgtcatgtgcgacatcatcctgctgtccctggttggcattcgggtggtggtggtccacggcggcgggccggagatcagcgagatgctgaagaagctcggccacgaaagccggtttgtggacggcctgcgctataccgacgccgagaccatggacgtggtccagtccgtcctctgcggcaaggtcaacaagaatctggtggcccagctgaaccgtctggggggccaggccatcggcctgtgcggcatggatgggcagctgttccaggcggagcagctggacgagaagtacggcctggtgggaaagatcacgggtgtgaatccggagccggtggaaaacgccctgctcagcggctatatccccgtggtgtccaccgtggcccagggcgtggacgcggacaccgcctacaacatcaacgcggataccgccgcctccaagctggcagccgccatgggggcggagaagctgatcctgctgacggacgtgcggggcctgctgcgcaatcccagggacgaggagacgctgatccacgtggtccacacctacgatgtgccgggcctggtggcccagggcatcatctccgggggcatgatccccaagatggagtgctgtgtggacgccatcgccggcggcgtggagcgggtccacatcctggacggacgcattccccattccattctcattgagctcctcagtgatgagggcatcggcaccatgttgaaaaaggaggactgatcccatgaccagccaagagatcaaggccctgaccgggcagtacatcatgaacacttacggccgcttcccggtggccatcgaccatggacagggcgccacgctctacgaccccgagggcaacgcctacatcgacttcaccagcggcatcggcgtcagcgatctgggctatggttgtcagccctgggtggacgccatcgccaagcaggcggggaagatcggccacacctccaacctgttctacactgagccaccggcccggctggcggagatcctctgcaagcggaccggcatgagcagcgtattcttcgccaacggcggcggcgaggccaacgagggcatgattaagctggcgagaaagtacagcttcgacaagtacggcaggggccgtgccgccatcgtcactctgaacaactccttccacggccgcaccatcaccaccctgacggccaccggccaggacgtgttccacaactatttcttccccttcaccgaggggttccggtatgccgacgccaacgaccttgcctccctggaggccgcagcgggggacgacgtgtgtgccgtcatgatggagctggtccagggcgagggcggcgtgctgcccctggaccgtgactatgtgaaggccgttgccagactgtgcgcggagaaggactggctgctgctggtggacgaggtccagaccggcgtagggcggacgggcagcctcttcgccttccagcagtacggcattttgccggacgtggcgtccttcgccaagggcattgccgggggactgcccatgagcggcattctggccaatgagaaatgccgggacgtgctgggccccggcactcacgccaccaccttcggcgccaatccggtgtgcgctgccgccggtctggtggtgcaggagacgctgacggacgcgtttctggaggacgtccgggccaagggcacgtatctgcgtaaccagatcgaggcgctggacctgccctgcttcggcgccacccggggcatggggctgatgatcggcatccaggtgaaggacggctggaccaataaggagatcgcaagcaagctgatcgaaaacggcctgctggtgctgaccgccggaccgagtatgcggctgctgccgcctcttgtgatctcccaagaggagatggaccaggggctggagatcctgaaaaagacgctctcctgaatctgtctttttcgctccggccggggacctgctgcgccccgccgtgactccggcacttacacgaacacccgctataactctaacactaacactaactataaccctaactataaccctaactataaccggagaattttacacaattttcccggactaaatgataaaagcgcccatggcgggacagagaggagacacccatggaaaaccacacccattttttaaagctcctggactttaccccggcggagatccagcagttcctggacaccgcagcagatctgaaggccaaaaagaaggccggcattccccaccggtatctggaggggaagaacgtggctctgatcttcgaaaaaacctccacccggacccggtgtgcctttgaggtggcctgccaggacttaggcatgggttccacctacctgggtcccactggcagccaaatcggtgtgaaggagtccatcgccgacaccgcccgggtgctgggccggatgtacgacggcatcgagtaccggggcttcggacaggaaattgtggaggagctggcaaactacgctgaggtgccggtgttcaacggcctcaccaatgagttccaccccacccagatcctggcagacttcctgaccatccaggagcacttcgggagactcaagggcatcaagctggtgtatctgggggacgcccggttcaatatgggcaatagtctgatggtgggctgcgccaagatggggatgcactttgtggcctgcgccccaaaggcgtacatgccggaccagaagctgatcgatacctgcttacgtctcgccgccgagaccggcgcggtgctggagttcattgaagaccccatggaagctgtcaagaacgccgacgtgctgtacacggacgtttgggtctccatgggggagccgatggaggtctggcaggagcgcattgccgccctggcgccctatcaggtgacaaaggccctgatggacaacgccgggccccagtgcaggttcatgcactgcctgcccgcctaccatgaccacaagaccaaggtggggaaagagatgggcgagaagttcggacgggagaccatggaggtcaccgacgaggtgttcgagtccccggcctccatcgtctttgacgaggcggagaaccggatgcacaccatcaaggccgtcatgtatgagctgatgaagtgagagaacgaaacagtgccccggagtatcaaaactccggggcgctgttatgcgtcgtcaaagcagatcccccggctgccagtcggcgggcagatcctgcggggtttggacgttcccgctctggtcgagcctgtaagcgcacagaatggtccatgtggtctggccgtggtcatcggtgatgcagacggcggctgtcagggtttccccgggcaggagttcacaggtgaaggtgtaatccgtccagttatacatttccacaaacccggcctctgcccacagctccaaggcctccggaacggggacggacgattccgggactgtctcctgatttcggtagaagcagatctccacctgagacggggaggggctgaaatgggtgttgcctccatgagagatggaaagggacaacccgcccagcgtgagtttcttgctggtctgcggccaggaatcgctctggaaatctctccactggttggcccagtcggtttggctgaacccaccccacacatccagccggaaatttccgggcagacagtcgtacaaggtttccatctggtcggcggcagtgacgccatccgtggtgagggatgcggagagaaggatttcctgatccatgggaagggtccaattctgagcggtgaaggttccgtttttcccagaggcctccgcagaaaactgccggccgtccgagagaagggcggtgaagagggcggtggtgttgtcctgccagcttttggcctgggccgacacctgaagggtcacagtccccgctgccaggtcgtagtccgtaacccgcgcctgggaaaccgcaaaaagattggaatcctcatccaggagatcccggatctgcccggcaagtgccccaatctggccgctgacgctgctctcgataccgtacacctgagactggacttgatccaggcggctgccaagggcggaaaggccgctgcccaaagccagcgccgccgtcaaagccgcgccgcaaatcccggcgcttacggcgatttttttcttccggctccacctggggttctggacgacctgggccgcgtcaagatatttttttgcgatggcctccactgccgccagctcccggtcggtcagctcccccgccggggcggtgccctccacgccttcaccgggggcttccggggcatctttttcggaacggtcctccgccgcttccggctctactcccagcagggcgccgatggtgacgccaaagatccggctcatggcgatcaggttctccagttccggcacggcggcgtccgcctcccacttgctcaccgcctggcggctgacgcccagccgctcccccagggattcctgagagaggccggcggcctttcgggcctcctggatgcggcggcccagggtctgctgctcccgcatggtatcaactcctttgccctcaccataccagagagcgggaaaaagcgcaaccaccggcgggtttcccggatgtcaaccacgggttgcggatgggaaaaagaaaataatttcccctgaatctcctgaaaaaacaaataaaaaatctctgcttgacaacaattttttattgttctatggtaagggcagagctgccggcggctcctgacagaactggaaggagcgaatacacatgaatcatttgaccttgcggggcacccaccgggagatgggctttcagtggggcgcccggctggcggagcgcggcctgcgcctgctggaccatgtgccctttcccctggaggcggagcggcgggcctttgcggctgcctgccacccggcgtatgcgcgccatttccccgccgccctggaggagctggaggggctggcggcggggcagaactgccggcaggaggacttggagacggtcctcttcaccacctacgccctgccgcccgcctgcggctgttcctgcctggcggtgtccaacgggaacggggtgttcttcggacggaacagcgactttctgacggcgctggagccggactacacccatgtgacatacggattttccgacagggcgatcccctttacagggaacaccacctcgtttgtgcagatggaggacgccgtcaacgcccggggactggccatcgggctcacctctgtctacacgcccaggccccggccgggtctgaacgccggcatggttctgcggctgctggcagagacctgcgccgccgtgccggaggccctggaccgcctgcgggcgctgcccctggcctcctgccagacgctgacgctggcggatgccgccggggacattgctgtggcggagtgcagcccggaggggatgcgggtggagcgtcccggcccggcgggacccttcgtctgcgccgcgaatctctttcactcggatctggcggtcccgctgccgccggggctggactcctggcgggcggcggagcggtacgacacgatgcgccgggtgctggagcgggagggggagacgctggctctttccggcgtccaggccctgctggcggggcgaaagggctttctctgccagtatgaccgggctgcggggcgggacaccgtctggtccgcggcctgcgacctgacccggcggcgctgcctgctggcggagggcaacccggggcggacggccttccgggagattcccttcccagtggagcggggggacagccgcccttgacacccgccgcccggctgcatacaatagaacggaatctgacaaaaaggaggggctgatatggagcgttccgctggcatcctgctgccggtgttctccctgccggggccttacggcatcggctccctgggccgggaggcccgggcctttgccgaatttctccacaacgccgggcagaggtggtggcaggtgctgccggtggggcccaccggagcggggaactccccctacaccagcgagtccaccttcgccgggaacccgctgctcatcgacctggaggacctgcgggaccggggcctgctgacggaggcggagttgtccgccgcccgggtgccggagggagcgcccatcgactacgccgccctctatgagagccgggaggcactgctgcggcgggccttctcccggctgggcggagcggaggcccagtccgtgcgggactttgccgcagccaatccctggctgggggagtacgccctgtaccgggcgctcaaggcccgcttcggccagacggcctggttcgactggccggacaaggacctcctgaaccgcgacccggcggcgctggcggccgcccggcaggagctggcggaggatatcgcttttcaccaggcggtgcagttctggttcttctcccagtggaaggccctgaaggaccacgccaacggcctgggggtgcggatcatcggggatctgcccatctacgtgtccctggacagcgccgacgtgtggagcgagcggagggagttcctgctggacgagacggggcggcccagccgggtggcgggcgtgccgccggactacttctcggaggagggccagctgtggggcaatcccctgtacgactgggcggcccagaagcgggacggcttcggctggtggatcagaagggtggagggcgcctcccgcctgttcgacgccatccgcatcgaccacttccgggcctttgagcggtactggtccgtccccgccggggcggagaccgccagagagggccgctgggaacccggccccggcatggacctgctgcgggtcctgaccggctggttcccccacatcacctacattgccgaggacctggggcttctcacgccggaggtccaccagctccgggaggcggcgggcctgccgggcatgaaggtgctggaattcgccttttcagaccccggcaacgactatctaccccacaactacggcagccgccggtgcgtctgctacaccggcacccacgacaacgacaccgccctgggctggtacgaccacgcgggggaagcggagcgggcctttgcggagcggtatctgggcgcctccggccgggagaatgtccggcgggcgctgctgcggtgcggcatgggcagcacggcggagctgttcgtggcccagatgcaggactacctggccctgggcagcgaggggcggatcaacgtccccggcgtggcggagggcaactggcgctggcggatggcccccggcgcggccgcggccgggctggcggtggacatccggcggctgacggaggtctacggccgctgctgaggaccggagaagcgcctgagaaattttgacggagggaaagcgcgatgaagattcgggaagtagaggagagaacgccccggctggtggaacagctggtggacgtgtgggaggcgtccgtgcgggccacgcatctgttcctctccgcgaacgagatcgcggagatcaagcggtatgtcccccaggctttgatgggagtggcgcatctggtggtagcggaacgggacgacggcgcgcccgccgcctttatgggagtccaggacggaaagctggaaatgctgttcctggcgccggaagagcgggggaaggggctgggaaggcagctcctggagcatggaatccagcggtatgcggtcgaatccctggcggtcaacgagcagaacccccaggcccgggacttttatgagcacatggggttccaggtctttgagcggtcggagctggacgaacagggaaatccctatccgattctctacatgcggcgggagacagccgccccttgacgggcggagcgttccatggtatcatttccctgtccctgggaagaagctctgaccggcggaccggacaattttggattctgtcgctctgaccggcacgggccagccccggccgcaagacggggaagcgcccggcggtgccgggcggacggcgcatgtcaaaatccccctctgccagcgcggcggaggggtttactttttggaaaaaggaggaatcctctgtggagacccgtgtggccgtgctggcgatcatcgtccgggacacggcctctgtcccggcgctgaacgagctgctgcaccagtacgccccctatatcatcgggcggatgggggtgccctaccacgcccggggcgtgaacatcatcagcgtggcggtggacgcaccggcggacgccatctccgccctgtccggcaagatcggccggctggcggggatcacggccaagaccgtttacgcgccggaggatgcgctgcaacaaggaaagtgaggaaacagaagatgaaacagtggatgaagaagagtctggcggcctgcctggccctggttatgtgcctgaccctggccgcctgtggcgggaaggagggcgagacgcccgcggaggagtccgtcaacgtccgggtggcggccctgaagggacccaccgccatgggcatggtgaagctgatgagcgattatgctcctgtggaggaagcgttggaggataaggagaatgtggtgaccgctggcggcggaaacacctatgagttcaccctggccgcctccgccgacgaggtgtcccccaagctgatgcagggggagctggacatcgcctgcgtgccggccaacctggcctccgtgctgtataaccggacggacggcggcatcgtcaccctggcggtgaataccctgggcgtgctgtatattgtggagaatggcaattccgtccagtccatgggggatctggcgggccggactatcgtggcctccggcaagggctccacgccggagtacgccctgcggtatctgctgacggagaacggcatcgacccggacaccggcgtcaccatcgactggaagagcgagcacagcgaatgcgtggcatccctggcatccggcgcggctaccatcgccatgctgccccagcctttcgtcaccgtggcccagacccagctgccggacctgcgggtggccctggacctgacagaggagtgggacgccctggacaacggctccgccctgctcaccggcgtggtggtggcccgggcagacttcgtgaaagagcacccggcggcggtcagcaacttcctggagcagtacagcgccagcgtggactgggtgaacgccaacaccgccgaggcggcggagctcatcggcggctatgacatcgtggacgctactgtggcggagaaggccctgccttactgcaatatcgtgtgcgtcaccggcacggagatgatggatatgctgtccggctatctgagcgtgctgtgggagcaggacgcagaatccgtgggcggcggtatgcccaacgacgacttctattacggcgcgtaacggctgacaaattttccgcgccccgggaacacccggggcgcggtggtttccaggagaaaggggaggcagatgaagcggcgaacaggctctgtccggctgtgggcggcggccttctggctgctggtgtgggagggggccagtctggccctggcggctaccaccggcgggcggatgctgctgctggcctctccggtgcaggcgctggggcggctgctggccctggcgggcacggcggccttctggcaggcggtggccttctcctccctccgcatcctggggggctttctcctggcctgcgcgctggcggcggtgctggcaccgctggcggcccgtttccagtgggtccgggacctgttgagccccctggtggcggtggtgaaagcggtgccggtggtgtccttcatcatcctggcgctgatcttcttctcgtcggagaacctgtctttgctgatctccgccctgatggtgttcccgccggtgtatctgaacgtgctggagggcatcgggcacacggaccggcagctgctggagatggcccgggtgttccgggtgccggtctcccggcagctgcggggcatctacctgccggcggtgctgccctatttccgctccgccgtgtcattggggctgggcctgtgctggaagtccggcgcggcggcggaggtcatcggcctgcctgccgggtctatcggcgaggcgctgtacaccgccaaggtgtacttccagaccggagacctcttcgcctggacggcggtgatcgtgacggtatcggtgatattcgagcggctgttcctccgcctggtggacgccgcagtgagaaaggcgggcagctgatggagattgcggtgaagcacctgtgcaaatccttcggggccggacggtgctgcgggacttgacctttactgcgggacccggcattacggccgtcatggcgccctccgggaccggcaagaccaccctgctgcgcatcctgctggggctggagcggccggacagcggcacggtggaggggcttgcgggaaagcggctcaccgccgtgttccaggaggaccggctgctggagcacctctccgctgagggcaatctccggtttgtgctgggccgggtttatgaccccgccgcggcccgggccctgctggaccggctgggcctgccggacacgggcgcgcagccggtgcgggagttctccggcggcatgaagcggcggctggccctggcacgggcgctgctggcgccctttgacgcgctggcgctggacgagcccttcaccggcctggaccgggagaaccgggacctggccctggcctgcatccgggagacggcgggggatcggccggtactgctggtgacccacgatgccgccgacgcggcgggatcgccggtcgtcacgctgtaaggaagaacagagcgcggcgccgcctccgggcggcgccgcggtgcgccataggactagctttttgggagagactatggtacaatggccgcaaagcggcgggagggcgcctgccatggctgggaccacgcccggcctcctgcgggacagccgcccggagcaccagatccccgcggggggtggcgcagcagccgcagcgtcagcgcaccgctcccgtgggggggccgaccatccaacaacctcaaccccggacggccgtccggggatgcgaccaaaaggagctgtctgtatgattaagatcaccaccgactccacctgcgacctgccgcgggagctgctggagcgatacaatatcaccgtgaccccgctggggatcatcaaggcggggaagctgtaccaggacggggtggacatccgcaccggggacatcgccgcccatgtggacgccggcggcgagatcaccaccaccaacgccgtcaatgtggcggactatgaggagctgttccgccgtctgatggaggagtatgacgcggtcatccacctgaacatcggcatgggcttttccagctgccaccagaacgcccgcctggcggcggaggaggtggacggcgtgtatgtggtggactccgccaacctgacggtgggccatgggatgctggtgctggccgccgcagaggccgcggaggccgggaagtctgtgacggagatcctggcgatgctggaggagatgattccccgggtggagaccagctttgtgctggaccggctggattacatgaaaaagggcggtcgctgctccaccgccacggccctgggtgccagcctgctgaagctccacccctgcctggacgtagtggacggcaagctgccggtgacgaagaagtaccggggctccatcgagaaggtggtggaggagtacgtccgggaccggctgcgggaccgcgcggacctggacacccaccgggcctttctggtggacacctgcccggacgaccacctggcctccatcgcccgggaggtcctgcgtcaggacgggcggttccaggagatcatcgaggccaaggcggggtgcaccatcttctgtcactgcggccccggcaccctgggcgtgatcttcctgcggaaggcgtgagaccgtgcgcgctgcgggcggcaggcccggcggcccgcttcccgcgccctggcatcaaacagaagagccggcccctctggggaccggctctctttgctggaaatcagatttacttgacggcgatggcctcgatctcgcagagcacgcccttgggcagctctcgcacggccacgcagctgcgggcgggcttggaggtgaaatacttggcgtacacctcgttgaaggcggcgaagtcgcccatgtccgccaggaaacaggtggtcttcaccacgctctctagagtgacgccggcggcctccagaatggcgcccacgttcttgcagctctgctccgcctgtgcggcgatgccctcggggatagcgccggtggcggggtccacgggaatctggccggaggtgatgaccaggtcgccgaaggcgtagccctgggagtaagggccgatggcgcccggagcgttgggggtggaaatcacggttttcatgggaaaaccctcctttgatcgatttggataccttcatcataacatccgccgcagaaaagtcaactaccggcgcttgtgaaaaagggaaaatcgtggtatacttttttggaatgtcttacaggaagggcggacggcccgccggaaggagaagagcaagtatgagcgatttgagggaagtccttcaggagaacagctatctgcgccagaagcagctgatcttcgcggactgcgaccggtaccagcgggcccgggtgagcacgctgttgagcatcgccgccgccgtggccggggcggactacgacgcccggggtctgacctatgagaagctctatgagatgcgggaggtgttcctgctctcccgcatcgccctgcggatccatcgctgccccagggcgctgcaggtggtggacgtcaccacctgggaggacggcgtcaaggccgcccacatgcagcgggtgtatgagatcacggacagggagggacttctggtgtccatccgcagcgactggattctggtggacccgcagacccggcgcatcatgcggcccggcaccttcacagccaagaagctgggcacctgccccaaggccatcgacgctccggagccccggaagatcctgctgccccgggagggggttgaggatctgggcgcccggaaggtggtctggtccgacctggacggtaacggccatgtgtacagcggcaactacggtgacttcgtctgggactacctgcccgccgacctgcaggaaaaggtgccccgggagttcttcatcaattacagcaaggaagccaccctgggccaggagctgcggatggtgggctgccgcaagggcggcgagtatctgatggagggcctgggcccggagggcgtctgcttctccgcccagtgcgtgttttaagatgcgggcggagccgttttccctgggcgggatgccggccctccgctgggggcggcccagccggcgggggatcctctacctccacggccagggcggaagcaaggcggaggctgcgttctttgccgccgcggcggcggacgccgggtggcagaccgtcagcgtggatctgcccggccacggggaccgggagtcagaggccgcggctctggtcccctggcaggtggtgccggagctgcggtgcgccctggcggagctgcggggcagatgggaccgggtggggctcttcggctccagcctgggggcctggttcggcctgctggcatatccggacgcgcccctggcgggggcgctgttcctctctccggtggtggacatggaggccctgatccgcaaaatgatgggctgggccggtgtcagtgaggagcggctggcccgggaggggcgcatccccacaacgttcggccagaccctctcctgggaatatctgcgatacgtccggacccaccctgcccgccggtggcggacgcccacggccatcctgtacggcgcccgggaccatctgacggaccgggagaccgtggaggcctttgccgcccggaatggctgccgcctgactgtggaggaggccggagagcactggttccacacgccggagcagctggcggtggtggaccgctggcagcgtgcctgcctggcggacctggaataagagaacagcgaagcgccgccccgcatccgcggggcggcgctgtgatttgaagcgggagcagagctcagaacccgtacagcatggagcggctgatgtccgccagggagtgggcgccgcacatagccatggtgtcggccagctcggccttcagcttttccacataggtcttgacgccctcggcaccggcaccgtacaccatggtgacgaagggccggccgatcagcaccgcgtccgcgcccagggccagggccttgaacacgtccatgccggtgcggatgccgccgtccaccagaatggtcatccggccgcccacagcgtccacgatggcgggcagcacctctgcggtagaggggcactgatccagcacccggccgccgtggttggacaccacgatgcccttggccccggcctccagagctttcttggccccggccacggtcatgatgcccttgacgatgaagggcttctccgccatggcaacgatctcgcgcagctcctccacagtcttgctgccggcggggggcgtcatgttcttcaggaagggcaggcccgccgcgtcgatgtccatggcgatggcaaagggatctgcggccttcaccaggtccatcttctgccggatggtctccaggttccagggcttgacggtgggcacgccgcagccgccgttcttggcgatggccgccgcagcgccctccatgaccgcagggtccgtgccgtcgccggtgaaggcggcgatgcccgcttcagcacaggcggccaccaggatgtcgttataggccagatcgttgtacttgtccccgtagtggagcgtcatggcgcccaccggggcagcgaagaccggcaggtccaccgtgcggccgaacaaggtgaaggaggtgtccaccggcttgttctcgcagatggtgtccatgttgacgcacagctcctgccacttctgatagttacggatgaagccggtcccgatgcccttggcgccggggccggggacggtgttcctgcaggccaagccgttgcacacgggacaggccttgcagtaggggcccatagcgccccgcgcttgttccagaacttcctgatatgtcatagattttcccctccgaattgttttccgaaaaccgcggcacgccgcggaaggctgccttgattgtactccctttaaaagaaaaaggcaacctttggcagagaagttcccgggcgcaaaaagaggctggaaaaattttttgttttcctgcaacatacggcccgcctttccgtctgaataggcagaggccccggtttggaagcggggcgtgaaaaggagggtattggaatgaaaagaggctttgcgtggctgctgacgctgctggcgctgctgggtctgctgtccggctgcggcggtggtggtgatacgactgtgtcggacaccgcctccaacagcgccgccacggatggggcggacgacccgggcggctcctacggcgcctgggcggaggcggaagtggctgaggactccggcggtacggcggaggacggtgcctccgaccgtctggaaaacgccaagatgatctacaccgcccggatggaggtggagaccaccgccttcgacaccgccgacgcggacctgcggacgctggtggaggtcctgggggctattttgagcaggcggcggtccatgactacggcagcggctatcgctccggcgactacaaagtgcgcatccccgcggatcagttccagcctttcctggaccgggtggggacactgtgccacgtcacctatcaggagcagaccagcgagaacgtcagcgaggcgtactacgacgcggagagccgcctggccactcagaggaccaagctggagcggctgcagaacctgctggcccaggcggagaatatggaggacattatcaccatcgaatccgccatctccgacacggagctggagatcgagcggctcaccggcaccctgcggcagtatgacgccctggtggactacgccactgtccatctctccctccaggaggtgtaccagctctccaatgtggaggagccggctaccagttttgcaagccgcatgggcgcggcctttgcttctggctggcgggggtttgtgggcgcactggagagtctggccgtggccctggcctacggctgggtgtggctgctgcttctggcggcggttggcaccgtggcgggccgccttctctggaagaggaggcgcagggagcggcaggccgcctccaaggagtcggagaacaagccgtaagacagaacggaacaaacagcgcatccggcgttggatgcgctgttttcctgccggatttttgaaaatgatgtggatttttgacggatgatattccgttttgtgttcgctgtcgggcatacaccgcgccgccgcggcacatactagcggggatcacggaggtggagcatgaatcggatttcatccaattatgaggaaaatgtgcaatggttcaacgacgtgctaggggcaggccgcagctgcgacatggtatgtcgggacctgtatgtgggcggccggcgggcccggttctgggtcatcgacggcttcggcggggacgccatcctggagcggatgggggccttctggctgtcgctccagccggaggcggtgcagggcctgacggagatgcagcagttcgcggaccgctatgtgacctttatggaggtgaacgtcagctatgaccgggatgacatcgtcacctccgtgctgatgggcaaaagcctgctggtgatggaggggctgtccggcgcggcgctgatcgacgccaaggagtatcccagccgcagcgtgggagagccgccggacggcaaggtcctccggggctctcatgacggattcattgaggcggtggtgcccaacatggccatgctgcgccgccgcatccgggatccccacctgaccatggaggggctgaaggtcggccagcggacccacagcgacgtggcgctgtgctacctggatgaccgggtggaccacgccctgctggacgagctgcgccacaagctccagaacatccaggccaactccctcaccatggcgcaggagagcgtggcggaggccatccgccccaagcagtggtacaaccccttcccaaaggtgcggtacactgagcggccggacaccgccgccgcctgcgtcatggagggcagcatcatcctgatggtggacaactctgcggcggtgatgatcctgcccaccaccttttttgactttacccaggaggccaatgacttctattttcccccgctggtgggcacgtatctgcgggtcctgcgggtgacggtgttcctgatctccctgctgattacccctgcctggtacctgatggtcagctcgccggggcgcctgccgtcctggctggatttcctctcctccccggagccggcggcgctgtctctgctgtcccagctgctggtggtggaattcctgatcgacgtgctgaagctggcgtccctgaacacgccggatacgctgtccaactccttctccatgctgggggccttgatcctgggtgattttgccgtgcaggccggatggctggggccggaagtactggtgtatatggcattcgtctccgtggcgggcttcgcccagcccagctatgagctggggtacgccttcaagctgctgcgggtggcgctgctgctgctgacagcggccttcgacgtctggggattctgcctggggttcgtgggcatcctagtcctgctggccaccacaaaacccctggtgggccacgggtatctctatcccctgatccccttcaacggcaaggcgcttcgccggctgctggtgcgggaacccatcaatcgggacaacacctgagagacccgctccttccagcacgcgccggacaggattctgtccggcgcgttttttccccgaaagcagaaaatttttcaaactgtggcatttccaaccccttttggaaaaaatgggcgctctgatgaaacggactgcggggacaaaagcccaccctggtgcgtttgacgaggagagaagggactcatatcacggatcatcatgaacttctacaccccttcagctttggatggaggggaaatttgaacaggcgggagagatgcagccggcggagagaaatgaggggccgccacagctgctccggtggccggacggcccggctgccgtctttgcagccgcgctggagacggccgtgcgtgcctgcatggcgccgcccggcggggggaaactgtttttcgccgacttgacgaaatttccggctgttttttcgctctcctgcccaaaacggggaatgtgccaaaatttttgttgtattgcaccggcaaaggttgtataatttctacattaggcatccccggcggccggtgggactggccgcggcaacagcacaacataaggagtggaacaaacatgagctattctgtacaaaacatccgcaacgtctgtctgctgggccacagcggaaacggcaagaccgccctggcagagagcctgctgtatatgaccggggccatcgaccggatgggccggggcgcggacgggaatacggtctgcgactatgatccggaggagaccaagcggcagatctccatctccaccgctgtggcgccgctggagtacaaggggtgccggatcaacgtgctggacacgccgggcgcgttcgacttcgccggcgaggtgatcgaggctctacgggccgccgacgccgccatcatcgtctgctccgccaaggacggcgtgtccgtgggcctggagaaggcgtggaaatactgcgaggagcggaatatgccccgctttatctatatctccaagaccgacgaggacaacagcgactacaacgccaccttcgaggctctgcgggcccggttcggcaacaagatcgcgcctctggtggtgcccatctgggacgagggcaagaaggtcaccggcatcatcgacgtgctgaacaagcgcgcctatgagatgcaggaccaaaagcgggtggagatcgagatccccgagggcaaggacgccgtcatcgaggagttcaacaacgccctgaaggagtccgtggccgaaaccagcgaggagttcatggacaagttcttcggcggcgaggacttcacctacgccgagatgattcagggcctgcgccagggcgtgcgggagttgagcctgttccccgtgctgtgcggctccgctgtcaactgcatgggcagcctgatgctgctggacgacatcgtggacctgctgcccaaccccatggagggcaactatcacaaggccacccgccaggacggcgagacggagccctttgtggtctcccccggcggcgtgcctacggccttcgtgttcaagaccgtctctgaccagtacggcaagtacagcttcgtcaaggtgctctccggcaccctgacgccggatctgcccatggtcaacgcccgcaccggcgtctctgaaaaactgggccgcctgtacaccatgcggggcaagaaggccaccgaggtgaaggagctgggctgcggcgacatcggcgccatcggcaagatggagaaggtcaagaccggcgataccctgtgcgacgcccggaaggtcgtcgccctgaaggaactgcccttcgcagagccctgctattccgtggccatcgtgcccaagacccggggccaggaggacaagatcgcccagggcctggcccgtatgaacgaggaggatcccaccttctccgtcaccaacaacgccgagacccaccagatggtgctcaacggctccggcgacatgcaggtggatgtgctggtcagcaagctgaagagccgcttcaatgtggaggcggatctgaagcccgtgcgggtgccctatcgggagaagatccgcaagactgtccagaagcagggccgccacaagaagcagaccggcggcagcggccagttcggcgacgtgtggatccggtttgaaccccagacggagcaggacgacatgatcttcgccgaggaggtcttcggcggcagcgtgcccaagaacttcttccctgcggtggagaagggcctgcgggaggcctgcgcccacggtcccctggcgggctatcccgtggtgaacctgaaggccgtgctgtacgacggctcctaccatccggtggactcctccgaaatcgcctttaagaccgcggcgcagctggcctacaaggccgccctgccggaggccaacccggtcctgctggagccggtgggcgagctgaaggtcactgtgcccgacagctacatgggcgacgtcatcggcgatctgaacaagcgccggggccgcgtcatgggcatggatcccaccggcgacggcaaccaggtgatctctgcggaggtgcccatggctgagatgggcagctacgccatcgatctgcggtctatgacgcagagccgcggcagcttcaccttccacttcgtccgctacgaggactgcccgccggcagcccaggagaaggccatcgcggaggcgaaggcgctccaggcggcggaggagaagtaaggaagaggcagtccgcgtctctccgccgggagtccggcgtacaagtattttgccggaggcaaaatcttgaaatcggccgaattcacttcgggcgatttgcatccaatgcggggtccccgcggggcgcaaagcggcttgcggggcgactgcccgccggcagcccaggagaaggccatcgcggaggcgaaggcgctccaggcggcggaggagaagtaaggaagaggcagtccgcgtctctccgccgggagtccggcgtacaagtattttgccggaggcaaaatcttgaaatcggccgaattcacttcgggcgatttgcatccaatgcggggtccccgcagggcgcaaagcggcttgcggggcgactgcccgcctgcggcccaggagaaggccatcgcggaggcgaaggcgctccaggcggcggaggaaagataacgcacatttgcaaaaaccaaaacggcggggagcaaactccccgccgtttctgtaagcagaaatgccacaagctgttaatttgtatgaaaggagcgggcacatgtatcaatataaatacattccggtggataccggcggcggcttcctgtcagacacccgggaacaccgggagcttatcgacgcatacgccgcagaaggctggcggtatgtgggatttttcccggtgagcttcacgagtcatggagggattagccgggtggacctgatctttgaacggagtcgtaaattgccgacttaaaatccaggaaaagttttctattagttgcaaaagcaacttcaaaatattagaatatcctgttatactcaaactgtcccaaggggactgaggaaaaaaggctttcaaaaaagataagtataaaaggaggacatttactatgaagaagtgggtctgctctgtctgcggttatgtttatgagggcgagaatccccccgagaagtgcccccagtgcggtgttcccgcctccaagttcaccgagcagaagggtgagctgagctgggctgccgagcatgtggtcggcgtgggcaagtccttcggcgagtctgttcccgccgaggtccagaaggagatcatcgacggtctgaacgccaacttcaccggcgagtgcactgaggtcggcatgtatctggccatgtcccgcgtggcatatcgtgagggctatgccgagattggtgagtattggcgccgggccgctctggaagaggccgagcacgctgccaagtttgcggagctgctgggcgatgtggtgaccgactccaccaagaagaacctggagatgcgggtcgaggccgagaacggcgccaccctgggcaagttcgagctggccaagctggccaagcagtacaacctggacgccatccacgacaccgtgcatgagatggcccgcgacgaggcccgtcacggcaaggctttcgagggcctgctgaagcggtacttcggctgattcgaaaagtccatacggcaaatcccccggccgccggccgggggatttttataaaaagagaggtaagaccgttcgcgccgcacgaaactaatcagaatctgtaacatctttcaaggccctgaggggcgcttgcttttctgctcccatatacatgaactgatgttggttgatctggtcatacatcaatttcggttaacatgcaggcagaaagagaggcttgcgtgtgatgatctcctatgacagcctgcgggacaaaatgaaggaaaaaggcatctctcaatacgccctgattaggcgctggcacatcaatccagcccagatcacccgcctgaagcggaatgagagcgtcagcccccacaccattgagatgttctgcaagatcctgaagtgtgaggtgggggacattatgcggcatattccggacgggaaagcgtaacggcagagcaggccgcccgctctgccgttttttgccgtccccggcccgattctacgctccgcagacaaaattcaagggcgggggatggtcaaacagcctgatttgcggtatgctgaggccagagaggagggaggcccatggatgccggaaagacaggcgcctatctggcggcgctgcggaaagcccggggcatgacccagcaggaggcggcggatcagctgggtgtctccaacaagaccgtgagcaagtgggaaaacggcgcggggctgccggatatcaccgtgctgcctgccttggcggagctgtacggcgtcaccgccgatgatatcctggcgggagagaccttgcggggccggccagcggaggcccagggaccggcacggcggcgcctcctgctgctgcggctgcggacccggttcgacctctgtttcatcggcagcctggcgctgggtgtgctggcggcattccgggtggcctatgtcagtctggcggcctggccgctgtcggtgggcctcttatggatcggctatgtgctggctgtccatccggcccggtacggtgatatatcgttggatgctaaaatttgggaaaacctgtaccgcaagctgctggccgcctccgccgtccagtggtgggccctgctgcggctggtgcggctgggcaggctggaggtggactttgcggagatgcggtactacgacaccatgcaagcctggaagccgctgctcttcgccgtggggctggcgctgctgtgcgccgtgctggagcgggccctgcgccgccgggcgggggcggatgcctctttgctgtggataccggagcggctgcggccaatgctccaccggagcggcggcttcctgcggcggacccggcggctctggctggtgtggctggcgtgggcggtacttctggcggggctgtggttcctggcggacggccagctggaccgggtgttggcgccctggatcgcccgatatggggaagagctggtccaaagcggtttcccggagagctggaccatcctgcgggggcggctggaggcggatgtggcactctggctccggctgcggcagggggtgctgatcgccggcgccgtctccggggctggcgtgctggtttggacgctgctacattggaaaaagcgccgcccccctcttgcggaggagggcgaaacatgatagaatctctccggcgaagaataaggggagaagtgtatgtatcactatattttctttgatttggacggcacgctgacagactccaaggagggcatcctcaacagcctgcggtatgcctttgacaagctgggggagccggtgccgccggagagcaccctcatcaaattcatcggcccgcccctgcaggactccttcgcggaattctgcggcttttcggcggagcgggccgcggaggccatcgccgccttccgggagcggtacgagcctgtcggcaagtttgagaacatggccgcccccggcatggcggacctgtgcgcccggctgaaggcccggggctatgtgctggctctggcctcctccaagccggagagcctgtgtgtgcccatctgcgagaagttcggcttcacgccgtctttggctgttgtgacgggcagcccgcccgtgggggactggagcaaggcggacgtgatccgggagactatgcgccgcctggagctgacggaggcccacaagccggagatcctgatggtgggggaccggaagttcgacgtgctgggcgccaaggcgtgcggcatcgcctgcgcgggcgtggagttcttcggctacgccgcccccggcgagctggcggagagcggcgctgtggccgtggtccggacaccggaggagctggagcagttcatcctgacccattgaatgcgaaaaaagaggcggcgcccatggggcgccgcctctttcaggcgcttcggtattcagccgacggtttccgcctcgaggacttccggcagggtcaggccctcaccagtgagatcggcggtgaggatggggtcgatgggcaccgccagatacatactattgccgtagacataggcgccggaggtaacggctaccgcctgaccgtagacgttcagcagggcgccgccgctgctgccctcggagatgtcggcggtgctcatgacgcagggcagggcgtaccgctccacatcccgctgcgtggcgctgacgatgccggagctgactgccagccccaggcccaggggattgccgatggcgtagaccgtgtcgcccgcccgcaggtctccggtgccggaatccgcgatgtccagcgtggcaaaagcagaggtgtcgtgtccctttagggcggcgtgggagacgcggatcaccgcgatatcgatgtccggatcgtagtagatgacccgctccacctcatatacatccccggtggagagcgtggcggtggcggagaccgcgtccgcgatggagtggtagttggtgatggccagcccgtcctccgtgatgaagaagccgctggcctcgccggtgacaaggccttcgtcccggtacgcctccgtctcataggtgtccagacggaacacggcggccgcgcagcggtccgccacctgccgggcggtgagggcgggggtcagcaggcccagggcgttggccgcggcccgggagacggtcccctggctcaccaggcgcccgatcactgtggcgctgccgtcccggtaggagaaggacagggcatccgccgccatctcaaacaggtcccctgggtcagggtgccggtataggcgatggggaagaggccgatccgctgggcgaaacccgcggcgtcggcaatggtaaagtcgcccgccttgtcggaataccccagcatccgcagcaggaaggcgctccaggcgttggcggtgagggccgcgtccggccggaaggctgtcgccgtgacgccggtgatccagccctgccgggcggcgtagttcacctcctgggcgatggaggcgggaacatcccggaagccggccagccagttgtctgccgcggcggcctgttctgccccggccagatgcaccagcagcacggccgcctgtgcccgggtggcgggggcgtccagattatatgtagagtcgatcagtcccagggtggagagggtgtccgcggcccgggccgcctccccctccagagcggaggcggcggggatcacgctcaccgtcaggacaaggacacagaggagcgaaagaagtcgttttttcatggggtagcctccaaatcttgagaatggctccattttagcaccgggcagagcgcttggcaaggcccggtccctttactgcccgggccgatttgggcgttcccaagactctcttggcggaaaagacggaacagaacggtatataaaaggccccgctgccgcacatgagggccttggttccactattctgtatattgggatcacgctcttctgcccttcagaaaagaacgcatcagcatcgcgatcatgccaatcatgagatagcagacgcaatacaacaaaaacgctgtttcacccatcgcaaagaatagccacgcccctgccagaaataatcccgcgacaacaattggaaggggccacagccgcttgatgtcctttcctgcaaatacgccgcatacagcagaaaatatgggattgaccccaaagaacagcagaaggcagacggccattcccgcgctgcctgcaaatgttgctgccaaccacggacagcctatcatcaacagcattgccaatatagaccagaagatcaatggcttcatgtggatggcctcccttttatacggaaatggttgcttttctatatgatatcatatacgtctggctgcttcaaggtttggaagcgggccccttcagcgaaagcgccggagctgcccatccgtccggaggaggcgggggagcaaggcccgtctcactggacaggcgggccaaagtctgctatactgaatctaccttttggaaaggaagcggcccatggcggagcgattggcggaggacctctggcggctggacatccccttggtggggaacccgctgaaaaacttgaacagctatttgctgaccggagagcggagcctgctgatcgacacgggcttccgccagcagtcctgccgcgaggccatggagcgccagctggcggagacgcacgtggaccgggaccggctggacattttctgcacccacctccacagcgaccacacagggctggcgccggagctgatccgccccggctgccggatctatatcggggagatcgacagccccggcgtgaaaaacgcctcggatccgtcctgttggaagcggctttacggggaatatgtgcgggacggcttcacccaggcggagatggaggccctgtggggagacaatccggcccagacggcggccccgccctggcgggaagggctctatacggagctgcaggacggcgcggcgctccattacggcggccgtatgctgcggtgcgtgctgacgccgggccacacgccggggcacctgtgcctgtatgacccggcccgccggcggctgttctgcggcgaccatgtgctgtttcacatcacgcccaacatctgccgctggcagggagtggaggactctttgggggactatctcagcagtctggacaggacggccgctctggacacagcggagctgtatcccgcccaccgggcggagaccggggacctgcggcagcggacggcggagctgaaggcccaccacgcccgccggctggaggacaccctgcggaccgtggagaaggcgccgggcctcaccgcctatcagatcgcaggccggatgcgttggagcatccgctgccggaactgggcggattttcccctggcgcagaagttctttgccgtgggagaggccctggcccatctggaccatctggaggcccaaaggcgggtcttccgccaggagatacatggaaaacgggtatatttcgccggcgtgggcgacaaaatatgaatgataaaggagatgcttcaaatggaagtgaaagagattctgagcaagtgcgaccacactctgctggcccaaacggccacctggaaggagatccaggccatctgcgacgatggtatgaagtacggctgcgccagcgtctgcatccctgccagctatgtcaagcaggcggcggagtatgtggcgggaaagctgcccatctgcacggtgatcggcttccccaacgggtatgacaccaccgccgccaagtgcttcatggccacggacgccgtggagaacggcgccgaggaggtggacatggtcatcaacctgggctgggtgaaggatcagaagtgggatgacctgctcgccgagatcaaggccgtgaaggccgcctgcaagggcaggctgctgaaggtcatcatcgagtgctgcttcctcacagacgaggagaagatcaagatgtgcgagatcgtcaccgcctccggcgcggagtatatcaagacctccacaggcttcggcaccggcggcgccacccgggaggacgtggcccttttcgccaagcacgtgggccccaacgtgaagatcaaggccgccggcggtatcgccgacctgaaggacgcggaggacttcatcaacctgggtgcctcccgcctgggcaccagccgcatcgtcaaggccgtgaaggccatggaagagaaataaggaggaaatgaaagcatgggaactccccataacgaggcggcccagggggcctttgccaagaccgttctgatgcccggcgatccgctgcgggccaaattcatcgcggagacctttctgcaggacgcgaagctggtgaacaacgtccggggcgtccagggctacaccggcacctatcagggcacgcctgtgtccgtcatggcctccggcatggggatgccctccatcggcatttactcccatgagctgttccacttctatgatgtggacaacatcatccgggtgggcagcgccggcgctatctccccccagctgaaggtgcgggacgtggtgttcggccagggctcctgcacggactccaactacgcccaccagttcggcctgggcggcaccttcgcccccatcgcggacttcaccctgctggagaccgccgtgacggtagcccggaagctcggcatcgagccccatgtgggcagcctgctcagctccgacgtgttctacaacaaggcgggcaacactctggactggggcaagatgggcgtgctggccgtagagatggagagcgcggccctgtactgcaacgccgccgaggcgggcaagcgggccttggccatctgtaccatctccgacagcttgattaccggcgaggagctgcctgccgccgaccgccagaccaccttcacccagatgatggagatcgccctgggcgttgccgtggaaatggcgaagaagtaaggcgagttcaaaaaagaagaatcagtccccgcggccacgcgggggaagcatgaagggggacgttgagtcccccttcatagttgatcggcccgccgcagcggcgactttcggcaaaggtgaaagcgggaggcccgccggcaaagccgccgggccgggacgcggagcatcttttccatattttcccggtccggcacaggccgagcctctccgggaaatgaccggtgacaatggaaacagagccgtgacaaaccacagcaaaaattttgcagaattggttctgctttttacaaaaccgtaaaaaagatatccgaaattcataaaaatttcaacaaaatgtggcgaaaaagaaaacaatttggaaatgcggttgcaatcctcaggaagagttgttataatgggcctgacccgttgaggtcatcctgcgcggagagattttcgcgcggataacaaaacgaaggaaggtagattccaatgaagaagtttcttgcattgctcctggcattggtgatgtccctgtccctggtcgcctgcggcggcggggacgacaccgccgctgacgggggcgccgatgcggaggatggcggcaacgccgagaccgccgcttatcaggtggctatgattactgactacggcgatatcaccgaccagtccttcaaccagaccacctatgaggcctgccaggagttctgtgacgccgagggcctgcagttcgagtactacaagcccgccggtgactccaccgccgagcgtgtggccatggtggacgccgctgtggctgacggctacaacgtcatcgtgatgcccggctacgcctttgccgagaccatcaaggagaccgcggagctgtatcccgacgtgaccttcatcgcgctggacgtggcgcagggcgatctgggcgaggactacaccgtgccctccaacgtgtactgcgctgtgtatcaggaagagctgtgcggctacatggccggctacgccgccgtgaagctgggctacacccacctgggcgtgctgggcggcatggccgttcccgccgtgcagcggttcggctatggcttcgtgcagggcgctgacgccgctgccgtggagatgggcatcgccgaccaggtcgtgatggagtatgcctatggcaaccagttctatggcgacagcgatatcaccgcctacatggacaactggtatcagaccctgggcgtggaggtcgtcttcgccagcggcggcggcatctacacctccgcggctgaggctgctgccaaggtcggcggcaagctgatcggcgtggacgtggaccagtccgccaacatcgacacctatggcgagggcatgtgcgtgacctccgccatgaagggtctggccgagaccgtcaagcacatgctgggcgaggtcgtggcaggcaactttgccaactacggcggccaggtggagaccctgggcctggtgaacggcgatgatcccaccgccaactatgtccagctgcccatggagaccacccagtggggcgacggcttcacccaggacgactataaggccctggtgaaggccatgtacgacggcgatgtcaccgtttccaacgacatctccgccatgcccgcaaccaccatcacggtgaactttgccggcaacatcaagtaaggatcagagtctttgcaggaagaggacgggagcaatcccgtcctctttttttgcctctggacaaattttacaaaacaaacctgatattcctgcattttttctttgaaatattccggaagatatagtacaataaatacactatacaagaggaggagggcggtaagcttggaacagccatatgccattgaaatgctgaatatcaccaagcgctttccgggaattgtcgcaaacgacaacatcacgctccaactgaagcggggcgagatccacgcgctgttgggagaaaacggcgccggaaagtccacgctgatgagcgtgctgttcggcctgtaccagccggaggagggcgtcatcaaaaaagacggccaggtggtgcagatcaaggacccgaacgatgcaaacgcactggggatcggcatggtccaccagcacttcaagctggtggaatgcttttccattttagacaacatcatcctgggcgtggaaccctgcaagaacggcttcctgcagaagcaggaggcccgggagaaggtcctggccctgtcggagaagtacggcctgcaggtggacccggacgcactggtggaggatgtcaccgtgggcatgcagcagcgcacggagatcctgaagatgctctaccgggacaatgagatcctgatcttcgacgagcccaccgctgtgctgacgccgcaggagatcgacgagctgatgcagatcatgaagaacctggcggcagagggcaaatccatcctgttcatctcccacaagctgaatgagatcatgtccgtggcggaccgctgcacggtcctgcggaagggcaaatacatcggcacggtgaacatcgccgagaccagccgtgaagagctgtcccgcatgatggtgggccgggacgtggagttcgcagtccacaaggagccctccaagcccaaggatcccatcctggtggtggagggtatgaccgtggcctccaagctccataacaacaatgctgtgaagaatatctcctttacggtccgggcgggagagattgtctgcattgccggtattgacggcaacggccagacggagctgatctacggcctgacgggcctggagcccctggagtccggcaagatcacgctctgcggccaggacatcacccgcgcccccatccggcagcggtctctgctgggcatgagccacattccggaggaccgccacaagcacggcctggtgctggactacaccctggaggacaacatggtgctccagcggtactttgagcctcagttcgtcagcaaggcgggcttcctgaagcgcaaggccatccgcgagtacgccaaccgcctgatcgagcagtacgacgtccgctccggccaggggcctgtcacagtggcccgcagcatgtccggcggcaaccagcagaaggccatcatcgcccgggagatcgacaaggacccggagctgctgatcgccgtgcagcccacccgcggcctggacgtgggcgccatcgatatcacaagcagatcgtggcccagcgggacgccggcaaggcggtgctgctggtgagcttggagctggacgaggtcatgtccctgtccgaccgtatcctggtgatctatgagggcgagatcgtgggcgagctggaccccaagaccaccacggcggaagagatgggcctgtacatggccggcgccaagcggaagggggcttgagaaaccatgagacaagaaaaatcatccctcctgcggaacaagggattccagtccctgctggcatccctgctgtgcatcgtgctgggcctgctgatcggctatatcgtgctgctgattatcaaccccgccggcgcgggagaggccatccgcaccattgtggagaacttcctgtactatcccagcgccgcggcccggctgcggtatctgggcaacacgctggtgaagaccgcgccgctgctgatgtgcagcctgtcggtgctgttcgcctataaggtgggcctgttcaacatcggcgccgccggccagtacgtcatcggcgccggcgccagcctgtactgcgccttgggcttcgggctgccctggtacgtgtgcctgttggcggctattgctgccggtgcggtgctgggcgccatctccgggctcctgaaggcgtaccgcaatgtgaatgaggtcatctcctgcatcatgctcaactggatcagcctgtatctggtgaacgccctgctgtcccaggtgaaggagacagccagtccctacaccttcaccctgagcagcacgaatcccgacgccatcctgccctctctgggcctgggcgccctgttctccgacaaccagtatgtgaccatcgccatccccctgacggtgatcgtggccgtgggcatctgggtcctgctggagaagaccaagctgggctatgagctgcgggccaccggctgcaacaagtttgcggccaagtactgcggcatgaaggagaagcgaaacatcatcctcaccatggccatcgccggcggccttgccggtatgggcgcggccacgctgttcctcaccggattcgagcagtggcaggtcacacagtccgcggtgccggccatgggcttcaacggcatcgccgccgccttcctgggcggactgaatcccatcggcgctatcttctcctcgtatttcattcagcacatcaccaacggcggcgcgtatgtggacaagaccatgtactccgcccagatctctgatctgatctccgccctgattatctacctgtgcggcttcgtactgttcttcaaggtctttatgaacagccggctggaccggcgggatgaaaagcggcgggcaaaggaagaccggcccggctctgaggaaggagggaaggcgtaatgttactgctgctgcaatacacgctgattttcgcctccgtcctgctgctggtggcgctgggcggctgcttctctgaacactccggcgtcatcaacatcggcctggagggcatcatggtcatgggcgccctgggcggtgcgctgatgatgaagttcctgcctgcaggcacctccgcctttgtggtggtgctgttgacggtgctggccagtatcctgctgggcatgatctactccctgctgctggcggtggcggccgtgaacttcaaggcggaccagacactggtgggcacggccatgaacctgctgggcaccgccgcggccaccgtgttcgtgaaggccatgaacaccgccgccgatccggacaacgtgtcctccaccatccagtacctggacggccgcaaggcattcctggtgaacatcggcggctttgagttcaactggtgcatgctgctggcggtgatcgccctggtaatcgcctatgtggtgctgtacaagacccgcttcggcctgcggctgtgcgcctgcggcgagcatccccaggcagcggattccgtgggcatcaacgtctaccggatgcgctacgccggcgtactgatctccggcgtgctgggcggcctgggcggcattgtgtatatcatcgcgggcgtcagcgagtggaagtttgaaaacggcgtggccggtttcggcttcctggccctggcggtgatgatcttcggccagtggaagcccacccgcatcgccctggcggcgctgctgttcggcttcttccgggccctgggcaatgtgtacagcggcttcgacctgctgagcaatctgaacctgcccagctccgtgtataacatgctgccctatgtcatctccctggtggtgctggccttcacatctcagaagtcccgcgcccccaaggcggagggcattccctacgacaagggccagcggtaattccatcacaaaacggaatttcacgacaaaatatgcctccctgttatcggcttcgacaacagggaggctgtttttatcccagcacgtagcccaccagcaaagcggccagcagcagggagaaggcactctgcaccaccttgcccaggaagcagttccgcagccgcaggccgctgccctccagcaccgccagcgtctgacacaggaccgagaggccgccccagcccgctgctgccgccgccagaagaaagccgaaggcatcagctgtcagcagtggcgtcagggagaagagctccagcgccgccaccaggaccgcccccaggcggccgcccacggcggtgagaggctgcgccagcacatagaagaacaccacgaaggcgcacacagacagaatcccggcaagcgaggaccggacagccccggtgaaggcctccgcaaagctgacagcccggaaaggaggacgccttgtcagctcctgccgggaagcggattttccgctgccccgaaacaccagtcccgtcagaagggcggagagcacatggatcagccacagccacaccccggcccgcacactgccgaacacccccacgcccagcacactgatgaggaacaccggattggagttgttgcagaaggccagcagccgctccgcctcctcccgggagaccagattttcccggtagaggtctgctgccgtcttggcgccgatggggtagccccccaccaaccccagcaccagcgcagcactgccagcaccggggacccggaacagcggctccatcagccccgccagccagggggcggccagctccccgaaccccagagccagcagcgctgaggaggccaccaggaaggggaacagggaggggaccacggaacgggcacagagggccaaagcttccgccacactgtcccgcacggccccggcgtccgccagaaaccacaccagcaggccgccgaggcacaggcaggccagtatccgccatcgaatccgcatcccgcatcacctctccacaccctatgccggagcgggggacactatgcccccggcatgttgcgggacgtttgtgcatacagtcgggaagaggtgaacgtatggagcggaatcgaaaggaccgaaacggtggcgtgctggacacggtggcggagctgttcgacctgccggcagatctggtggcgggcctgccccacctggagatgatgggcagccgccagctgtatctggagcaccacacaggcatcctggcgtacagcgacgagcagatcgacgtaaacaccaccggcggcgtgctgcgggtccggggcgcccgcctggccctgatggccatgacggcggaggagctgcggatcggcggggacattgccgccgtggagtgggtgaggtgacaccatgctgaatcagatcgtcaaccggctccagggccaggtccggatccgggtggagaccccctttccggagcgggtgctgaatctgtgcggcgcccggaacctggccttctgggatatggagtgggagtccgagactgccttcacctgccggctgaaccggcgggattactacgccctgcgccgggcggtgaaacagctggactgccggctgaccgtggtgcggaaggagggggtacccttcttcctgggccggttccggcggcggcacgcgctgttggcgggactgaccctgtgcagcgcactgctgttcttcggctccttcttcatctgggacttcacggtggaggggaaccagcgggtcacagacgaggagatcctgcgggcgctgcagcggcagggggtggggatcgggaccttcggcatctccctggacacggaggacatccgcaaccatgtgctgctggagattccggagctgctgtggatcacagtgaacgtctccggctgccgggcctatgtagaggtgcgggagcgggtggaggcgccggagccggtggacgagcgggagcccaccaacgtggtggcccgccgggacgggctgatcctggacatccaggcgatggatggggtccggtgcgtgctgccggggacgtcggtggaggcgggcgagctgctgatctccggcgtggaggacacggagaccgtgggcgcccgggtcctgaccggcatgggaaaggcggaggcccggacctggtacaccctctccacagtaatgcctctgacggtggcggaaaagcagtacaccggagaggagaaacagggctactccctggtctttgggacaaatcgggtaaaattctttttaaacagtagcatcgggacgggaaactatgataaaataaccgaaaggacccagtggtccctgttcgggctgccgctgccggtcacctttgtgaaggagacctttcgtttttacgagacggtccccgccgaggtctccgccgcccaggcggagagccggggtgaggcgatcctcacggactacctccacactctggtggacccctacggcaccgtcagctctaccctgtgcacttctcgccgggagggggacggactgctggtgacactgacggcggagtgtgtggaggagatcggccgggccgtgcccatctacacagaccccacagaagaatcgggcggctgatgcccgggagatacaggagtgataccttggaacagcgaatcagcattgagcggctggagcaggccgtgaatatttttggctcctttgacgagaacatccgcctgctggagcaggagttctccgtcacggtggtgaaccgggacggggagctccgggtggagggcgagccggaggacaccatgctggcctgcaaggccatccaggccctgctgaccctctcttcgcggggggaggccatcggggagcagaacgtccgctacgtcatcggcctggtgcgcagcggcaaggagtcccagatcaccgagctcaccggcgacgtactgtgcatcagcgccaagggccggcccatcaagcccaagaccatcggtcagaaggagtatatcaagtccgtcctgaagaacaccgtcaccatcggcgtgggcccggcgggcaccggcaagacgtatctggccgtggccgccgccgtgcaggcgtttcgggacaagcaggtgaaccgcatcatcctgacccgtccggcggtggaggccggcgagcggctgggcttcctgcccggggacctgcaatcaaaggtggatccctacctgcggccgctgtacgacgccctcttcgacatgctgggggcggagacctatcagaagtatttggagcggggcaacattgaggtggcccctctggcctatatgcggggccggacgctggacgacagcttcatcatcctggacgaggcccagaacacctcccgggagcagatgaagatgttcctgacccggctgggcttcgggtccaagatcgtcatcaccggcgacgtgacccagatcgacctgccggacggcaaggcgtccggtttgaaggaggccatgcgggtcctgcgggacgtggagggcatcggcatctgcgagctgaccaacgccgacgtggtccgccatgtgatggtccagcggatcgtggaggcctatgagcggtacgagaccgcgaaaaacggcggaaaggggcggaagtgatggcgaagcggcattatatccccgtcaccgccgacgtgcccggcgccgccagtgagggcaactgcgccctgatccgcaaggtgatccgcaccgccctggcggcggagggggtggacgttccctgtgaggtggacgtgctgctgacgaacgacagcggcattcacgaaatcaaccgggagatgcggcaggtggacgcctctacggacgtgctgagctttccggagttcgaccttcggcccggggagctgcccgcaccggaggacgcagacccgggcaccggcctggtgcccctgggggacatggtgatctccatggagcatgtggcggcccaggccagggagtacggccacgccaaacggcgggagctgagctatctggtggtgcactctgttctgcacctgctggggtacgaccatctggacgaggggccccagaaggcccagatgcgggcgagagaggaagccatcctgggggagctgggcatcgggcggtgaatcactcccggggcaggccccggccggtgcgcaggcccagcaggaaagcgtggatggcggtgaactccaggtttttttcatagctttccaaggcgtgataacccaactcgttatgaatcatatccatgtggaagttatagtcgtccgctgggacagtgtccaggtagggcttgatgtagtggagataaagccatatcataaagtctgacatagaaaccacctttcaaaaaacaccattttcactgtgctatgatgaaaagataacacagttaattcgcggtgtcaagaggaacaaaatgcttttgaaagaaagactgcgagaattgcgcaaggagaaaaaagagacacaggttcaggtagctgaggcgattgggattgttgagcagcactaccagaaatttgagggtggtgttaacctccccaacctggaaaacgcctggaagctggcggaccacttcggcgtcaccatcgactatctggtggggcgaagcgacaagcgggggtaacatgagatgggccgccgtcgcggcggcctcggggatctctgctcccgcagggggcttgtccggcgggatgcgccccccattctctttttggttgcgccaaaaagagaatgcgccgcgcccggtggaagagaaaaagcgcttcggcggggcggtctgcgccagcgcagacctcctgccgccggcgggggatggttggcactcccttgcagaagtcagggacggaaacgcaccgcccttggggaatccttaggcccggggaggttcagggatacccctgcttcgctttccgctgccgctcacgcttccgcggagaaccagccagcgcgtagcgacgcggaacgcgcgaaaagagaagctggtcaaatgcgatcttgcaccccgacgacctccgcaccatccgccacgggtcggcagttgggggaaccgcagaagacctaagcgtgcccgaaggctaggcaaaatcggagcaggcaccggtacgccgacccccgtcagcgcggagggccactgcaccggagcgcgtccaagcggccttttcttttggaccgtgcacggcccgttttcttttcggcaagaccgaaaagaaaatgggggtgcattgcccagctatcatcatagctgccattccgcgtccaatgggacgcaccccaaacactcccgccccggaacaccgaatctgccccgttgcatacactatcccgaggtgatttgggatgacattgctgcaagacggtttgatcgcgttcttctccgcggtgggcgtgaccaccctggtgtggatcgtggcaggggcctttttccgggcggggcggccggcggtgccggggctgctgctggtgctgcccctgcggggagaggccctggccatggaggcggacgtgcgggagctgcggcgcctgcgggggcgcctgcccggggccagaatcgtgctggcggactgtgggctaacccgggacgcccgggcgctggcggcctatctggcggaccgggatccgggggtggcgctgacggacggcgctgtgatccgtctggacgaaaacgagcatacgaaagaggaagagcatggaagagctggtcacctgtgagggaacggtacatagcatcatttttcaaaatgccgagaacggctatacggtcctgcgcctcctgacggaggagggtgaggtgattacggtggtgggctgtatcccctgcgtggcgccgggagagcacctggcggtctccggcgtgccggagacccacccccagcacggggaacagctccgggcggtggagctggagcggagcctgccggaggacgaggaggagatcttcagctatctctcctcaggcatctgcaagggggtgggccccgccaccgcgcggcggattgtggagcggttcggggcggagaccctggacgttctggagcgggagccggagcgcctgaccacgctcaaaggcgtcaccgcccgcaaggcccaggagatcgcggagagcttccgccagcacatgggcctgcggcggctgatggcctttctggcccagtaccagctgcctcctgtcctggctatggagctgcggcggcagtacggcgacgcggcgctggagaaggtgcgggagaatccctacctcctctccggcgaggcgtgcggggtggagttctccgtcaccgacgggatcgccatgggcatggggctggctgcggacagcgaccagcggctccaggcggcggtgacctttgagctgagccacaatgaaaacaacggccacgtgttcctgccccggaacaagctgatctccgccacgacccagctgctggacagcggggcggagctggtggagcaggctctggacagcctcattgaacggggcgcggtggtccaggaacaggtggcccatgtggaggcctgctacctccggcggctgtgggaggcggagtgttccgcctgcatccgcctggcggggctgctggctgcggatacagaccgcagtgcccaggcgggccgggcggtggacgagctggaggcccagcagggcatcacctatgcgcccctgcagcggcaggcggtggagctggccgcccggacgggggtgctggtcctcacgggaggccccggcaccggcaagaccaccacagtccggggcatcgtggccctgttccggcggatgggcctggagatcgtcctggcggcccccaccgggcgggcggccaagcgcatgagcgagctgaccggcatggaggcccagacggtccaccggatgctggggatgagctggaacgacgtcacccatcaggtgacgttccaaaagacggaaaaggagccgctggaggcggacgcggtgatcgtggatgagatgtccatggtggacctggcgctgttttccgctctgctgcgggccctgcggcccggcacccggctggtgctggtgggggatgcggaccagctgccctccgtgggggcgggaaacgtgttctccgacctgatccgcagcggcagggtggagacggtgttcctccgggaggtgttccgccaggcggagcagtcggccatcatccgcaacgcccacgcggtgaacctgggccagccgccccagctggccaacaaccagggagacttcttcttcctctgccgccgggatggggagcggaccctctccacggtggtggagctgtgcaaaacccggctgccggaccacatgggcatcccggcggaccagatccaggtgctgacgcccacccggaaggggcccagcggcacggagaatctgaaccgctgtcttcaggcggcgctgaacccgccggcggcggacaaacgggagatccagtggggagagcggctgttccgcaccggagaccggatcatgcagacgaaaaacaactacaacgtggtatgggaaaaggcggacggcaccgtgggcaccggcatgttcaacggagacgtgggaaggatcgtggagatcgacccgtccggagagctgctggtggtgaactttgatgaccggatcgccacgtacacgctggatatgctcaatgagatcgatctggcctatgccatgacggtccacaaggcccagggcagcgagtaccagtgcgtggtgctggcggccatgccggcagcgccgtccctgatggtgcggggagtgctgtacacggccctgacccgtgcaagagagcttctgatcgtggtgggggacgacgcggccatccgggccatggcggccaacgaccgtcagcagcggcggtattccggcctccggtggaggctggcacattttgcggatccggcggagagataaaggccgccaggtttgctgccggtggaggatggggtgcgtcccattggacgcgggacgggcagttatgctgctggctgggcagatacacccccgtttcccttttggaaagacaaaagagaaacgggggctgtatccctgctggaccagcccctgcgggagcagacaccccgaggccgccatccggcgtcccctgcgtatccgcccagccgtcatggctgagttttgcagatggaaactgacgccaacggtttcatagaacaggcgtgcaacacggacccatatgggtcccatttttttacctttcctccatagaataaagcaaaatcggaccgaaacaggtcctgttgcggaggcgtctatggaggagcagaagatcaagcaggacatccggattggagccaatattcggcggatccgaaaaaatcgaggcatcaagcccatggcactggtccgcctgctccagctggagggcgtggaaatcacccgggaatcgctggtgaagattgaacgaggggctcagcatatcaaggcttcccagctccggggtatccgtgacgctttgcataccacgtatgacgaactgctggcggaggcagagaaacgatgagcctgctgtccgccctcctggacctcatcttcccagccaagtgccccttctgcggccgtgttttggacagaccgggcatctgtgacacctgtcgcggggagcttccctggacggagggagccgacgccctgcgccgggggcccggcggctttctctgcgcggcgcctctgtggtaccagggcctggcccgagaggggctccaccgcttcaagttccgggggatgtcctctgctgcggcgcccctgggagagctgatcgccgggtgcgcggcggagcacttctccggagcgttcgacacggtgacctgggtacctgtcagccccaggcgcctgcgtcagcgggggtatgaccaggcccgcctgctggcggagagcgcctgccgcctgtgggagacgaagccgctgccgctgctgcgcaagaccgtccacaaccccgcccagtcgggactgaaggaagctgccgcccgccgggccaatgtgctgggggtctatgaggcggtggacccggagcggatctcggggcatcgtatcctgctggtggacgacatctgcaccaccggcgccaccttggcagagtgcgcccgggtgctgcgggaggccggagcggcagacgtggtctgcgccgcagcggccttgacgccgctggagagggacagcgggaaaaaggcctgaatcggtggaaattgttcacaaattagtgttgcattcccaggaaactgccagtataataaagactgtatgattgttcgcgggaaaaccgcttatactataagacagaaagatcaaatgaggtggagtcagtatgtccatgacgaaggatatcggtatcgatctgggtaccgcgtcggttttggtatatgtaaaggggaagggaatcgtcctgaacgagccgtccgtggtggccatggacaagacaaccggcaagctgctgaaggtgggcgcagaggctcaggccatgctgggccggacccccggcaacatcatcgccatccgccccctgcgggagggcgtcatctccgactacgacatgacggagcggatgctgcgggagtttatccacaaggtggcgggcgtgtccttcttcaagccccgggtcatcatctgcgtgccctccggcattacggaggtcgaggagcgcgccgtcatcgacgcgggcatccaagctggcgcccggaaggtctacctcattgaagaaccggtggccgcagccatcggcgctggcatcgacatcacccagcccgacggtcacatggtggtggacatcggcggcggcaccgcggacatcgctgtcatctccctgtccggcgtggtggagagcgcctccatcaagatcgccggcgaccagctgaacgaggccgtggtcaagtacatgcgccgcaagcacaacctgctggtgggcgagcgcaccgctgaggagatgaagaagcagatcggctgtgtcttccccaaggacgaggaggagaccatggacgtgaagggccgctgcctgctgaccggcctgcccaaggtggtcaccgtcagctccacggagatgatggatgcctttgaggagccggtggagcggatcatggaggccatccactccgtactggagcggacgccgccggagctggtggcggacatctccaccaacggcatcgtcatgacgggcggcggcagcctggtctccggctttgataagctggtgacggcccggaccggcattcacacagtgattgccgacgacgctatcagctgtgtggcgctgggcaccggcaagagtctggactccctgaacgccatgcaggacggcacgatgaatctcagccgccgcaagcagatgaactgatgtgtgacgcagcggccgcgggctggcacccgcggccgttttctccgctgacagcccggagagctgttgcgaaaacgactgcacccctgcggagcggggcatatactttgcgggaagagtaggaaacggcacaggcatatcccgtgctttacgatcaaggacaaggaatgaaagtatgctagagttcaaaccagtgacaaagcaggaggccccccgcctccggcggtattaccagacctgtgagttcggcctgtgtgagtattccgtgggcaccaagctcatgtggaaggccgcgctccacccggcctgggcggagattgccggatgcctggtggtccgcaatgagatcgacggccaggtagtcttcgactacccggttcccggcccggagggggacgaggatgcggccctggaggccattgagaacgactgtctggagcggggtatccccccggtgatctctgtggtgccggagtgcagggccgccaagctgctgggccggtatccctatgtgcgggtcagcgatgtgcggacctggcgggactacgtctattaccgggaggatttgcagttcttcgccgggcggcggtactccggccagcggaaccacatcaacaagttccggtccaagtggccggatgcgcagttccgccccctgacggcggcggacgcaccggtgatcgagcagttctggcaggactatgaggcggagttccccaaggacagcaacgccaaggccaaaaatgagctggagctggccaaaaagatgctgaagatgaccggcaagccctactttttcaccggcggcatgtttgacggggagaagctgatcgccctgtccctggcggaaaagtgtggggacaccctgatcatccacattgaaaaggccctctactcctataccggtgtatatcctgcgctggtccaggcattcgccgacgcctttggcgatggctgccagtggatcaaccgggaggatgacgcggcggacaagggcctcaggacttccaagctccagtacggcccggccaggctggcgcccaagtaccggttcgatccccagaatgagctgctgaaccacgtgcaggccattccggagctgaagacggagcggctgaccctctccgccctgacagaggcggatatccccgcctacaacgccctggtgctggacgccgaccggaaccgctggtggggctatgacgatgtgggcggcctgggcggccgggtggaggagcggagcttcttcgacgtggcgaaacgggattttgaaaaccggcaggcggtgaactttgccgtccggctggatgggaagctcatcggcgaggcggtgctgtaccggttcgactgccggggcggcgcggagctgggctgccggattgacaaggcatacgccggaaacggatacggcaccgaggccttcgctgctgtggcggagtggggcctgtacaaaatccatctgagccgggtggtggccaagtgttacaaggagaaccaggcgtcctacaagatgttgtcggcctgtatgcggaagaagggggaggacgacaccttcttctactttgaaaagctggtataaagcccatgccgccggtgcctcagcaccggcggcatgttttgattcagatgtgcagatccgaccggcggcagaaaccgcctgggagaaggcccagctccgcggccttggtggctgggatccggcgggagaggcgctttccggtccggtcctctgccagcacccacatctgggactcggccaggacctccccgcagcaaaagtccaccggctccagtttcaggatgcgcagcgccccttcggcgggagccgtcactgcaggtactccgggccaaagctgtggggcagcagttcttccagggtgaaggtccgctcctctccggcgccgttgagacagatgatctcgatgttgggggcaaactcccgcagcacctggcggcacacgccgcaggggacgcagagctcacggctccgcccggcgatcacgatgcggacaaagtcccggtgcccctcgctgacggctttggccaccgcggtccgctcggcgcagatggtgggaccgaaggaggcgttctcgatgttgcagccggtgaacaccgtaccgtcgctgcactccagggcggcgcccacggggaagtgggaataggggatgtaggcccggtccagcatggcgacggccgcggccttcagttcttcacgggtcatggaaatacactcctttgcaagatgcgctcaactgacggccggaagcgacacccagctcaccggcagagcattcaggtcggtgtccgtgctggtggtggccgggatatcatactggacgatcacccagccgcccagggtgggggcatcataaatgtccccgaacaggccggacaggccgccgcccggctttccccaggcgtccagaatgtcctggcggcaaaaaccggacagggcctcagcggcttcatcattcgtcatgccctcgatctcagtcagggagggaacctcctgttctgctttcccggagccgcaggccgtcagcccggccaccagaaggatggacagcagaaacaaatagacacaccttttcacggtggctctccccccttacgcccagtcgatctcccgctggggacgaaccgttacatccatgatatcctttgcgtcgtaaaattgcaagtaccggtctctggaatggcgcagggtggtgccgtccgggtggagccggtcgcagatgacggcgcagagatccttcttgatatagctgaagctctcaatgcccacggaggcaaagactcggaagccctggctctggaggtattggaacaccgggccggtgttctgccagtcgttgccgtcgggccgctccccgtgagggtaaaacaggatggtagtgggacccaccaggctgcccacctcgtcaaaccatcgctgggtgtccgcctggatggattccaggctcttggtgcccaggcggatgtgcccccaggtgtgactgccgaaggtccagccggtgcgcttgagctctgcgataataggcttcaccgcctcgatctccttctggcggttggcctcccgctccgcggtccactccacatcctgatccgtctgggtgcggtagcccaggatgccctgatatcccgtcaggctcaggcagcccttggcgccgaagggggagaagtccaggtgctcttccacaaacttgtccaggatggggatggcgtccaggtcccgggaggtcacctcattgccctgggggtccttgccccaggaggcgatcttgccatcctccccgatcaccagcttgtaggtgaagccattggcaagcatatattcatagtagttggtgtcgtcgtaggagaggatcaggggctttttgccctccggcaggtagagggtgttccgaaccatcttaggctgaccgtcctcgccggtggtctcgctccacacatcgccgatgtccaccagcacgtagcccttgtcatagacactctggaggattttgttgtactcatccaccgtcaccatgtaatcgtcaatgccgttggcctgggcgtctccgtcaaaggccagctccggataggccaccactggatggaagaacaggtgctccacgatgccgtcataggccgcgtaggtgacaccgtcccgaacgccgccctccggcatgaccgtggggtctgaaatctcatagggttccggctccggcaactccggggcctcctcttccggagtcgggtctccggcggcattttgagcggagccgccagcggaggctccctgcccgcaggcagccagggagagcagcatcagcgcggcaagcagcagtgcggtaaaacggcgcatgatcggatgttcctttctgtcgatttttgtcggtgaccatagtatagcaggaaaccggacaggaaagaacaacaaaaaaatgacaaaataagaacagggcggcaacggttgccctgagaccgcaaaaaagtggctgcagccactcttttagagctgcagacccagcgcgcaaaacctgcccgccataggagacggacaggtcttgcacagatggggcgggaagtggtttcggccgtgcgcaggaggcggctgaacccagaatttgatgcgcctgcgggcacgaatgccgcggcggccccggttcccttaccgcttgtcccccggccggaagatggccgccatgagcacgcccgccaccacggcggccgtgacgccccccgccgcagcggtgagcccgccggtgaagatgccgatccagccatcggaggccaccgcctcccggacgcccttggccagcgtgtggccgaagcctgtcagggggaccgtggccccggcgccgccccactgggccaggggctcatacagccccagggcactgagcagcacgcccactaccacgtatccggtgagaatgcgggcgggggtcagctgagtcttgtcgatgatgatctgtcccacggcgcacaggataccgccgcagagaaacgcgttgagatattccatgagatgtctccccctcttttcataagagcagtgtgcccggttccggcgggattatgcagtgcggcccggagacacagatctccgggccgtgatgaaaccatggggcgaaaagagatgtttattccgcatcctggagtgcgccgtatccctcttctccggttcggactttgatgacgttctccacgtcgtagataaagatcttgccgtcgccgatatggccggtgtacagaacttttttggcggtctctaccaccaggcgcacaggcagcctgcacaccacaatggacacttgaatgctgggcagcatagtggcctccaccctggccccccggaagtagccctcggtcttgccccgctgttcgccgcagcccatgacgttgatggcagtcatgccggtgatgccgatgtcgaacatggcccgcttcagggcatcgaaccgctccatcttgcagagaatgtctaccttggtcatcttgacgccgggggaagcggataccgcatctgccggggcagtgaccacctccaccggcaccgcctcctgcaccgggaccggcgcggcggccggggcggcaggattcagtacagcagcgccgtctggggtatcgtcataggcaaaggcaaagccgccataggcggtgggcaggccgtgctcggtgatgtccagtcccttgacctcctcctcgggtgaaacccgcagaccgatggtatgcttgagcacctggaacacaatggtaatggtgacaatggtccagaccgccgtggccgctacacccaggcactgaacgccgaagaaatggaagccgccgccgtagaacacaccgccgtccactgccagcagtccggtgagcaaggtacctgcggccccacagacgccatggacagagatggcgcccaccgggtcgtcaatcttcagcacagagtcaaagaagttcacggagataggcagcagcaggccggctgcgatgccgatgatggcggcgccgccgatggaaaccgcatcacatccggcggtgacggccaccagtcccgccagggcggcattcatcgtcatgcccacatctggctttttatagcggagccaggtgtacagcatggtgacgcagcaggcgacggcagcagacatattggtgttgacgaagatcagccccgcggagaccagggtgttgtctccggtcatggagacggtagaggccccattgaacccaaaccagcagaaccacaggatgaacacaccgagggcaccgagagagaggctgtggcccaggatggcccggggtttgccgtccttgtcgtatttgcccagtcgggggccgaggatggcggcgccgatacaggcacagatgccacccaccatgtggaccgccgtggagccggcaaagtcgtggaagcccagatcactgagccagccgccgccccagatccagtggccggagatgggatagatgaaggcagaaatgcagaaggaatagatacagtaggagaggaattttgttcgctccgccatggcgccggagacgatggtggcggatgtggcgcagaaaacggtttggaagatcagataggcgaacaggggcacgccctccggcaggatggcggagtagtcccctggaccatagggtccaggccgccgatcagggccccgccgctggcgaacatcaggccgaagcccagcagccagtagaccggcgtgccgatgcagaagtccatgagatttttcatgaggatgttgcctgtgttcttggcccgggtgaagccggcctcgcacatggcgaagcccgcctgcatcaaaaagaccagcgccgcgcctagcaggacccagatggtgttgactgatgaatacatcgtgttccctcctaaatcaccacgggcggcggccgcgcgtcacgccgcgccttggaacaaatacaggcaagggcgtctgtgagatggtctcacaggcgcccttgcctttgatggagaacactttaccacggtagacggacagcgtcaagacacgttcttcacaagaaatctgctgaatccgccaaaaatttatccgaaatttatataggttgaccaattactcccggacggcgctcaggcgcacggcgtggcagatggaggggatggactccccctggccagaagaggtgggggagagcagcgccccggtgggggcgaagagaatggtcttccacttgccctcccgcatcttgcgcaggagatagccgttgagcacggaggcagagcagccgcagccggaggctccggcgtgcatatcctggtgcttccggtcatacagcagcaggccgcagtcctggaactgggggcccatgtccacaccgtcccgctggaagaagtcccggacgatggcgtggcccagctctcccaggtcaccggtgaggatcaggtcgaagtccgcgggcttgtacccggtgtcccggaagaaggcggaaagggtgtcgtaggctgcgggggccatggcggcgcccatgttgttggcgtccgtaatgcccttgtccacgatccggccgcaggtgacgtgggtgacgtaggggccggggccgtcgctgcccaggatggtgcagccagccgcagtggtcgtccactgggcggtgggcgtccgctggctgccgtagggcaccggcatccggtactgccgctcggcggtgcagaagtgggaggaggtcagggcggcggcccggtcggcgtagccgccatcgatcagcagggacgccaggctcaggctctctcccatggtggagcaggcaccgtagagcccgtagaagggcacccggaagtcccgcaggccgaaggaggagccgatacactggttcaacagatctccggccaggatatagtccaggtcctccggcgtcagctccgccttctccagcgctcgctgaaggaccgtcttctgcatggcggactctgctttctcccaggtcttttccccgaagaaggagtcgttgctgatctcgtcaaaaaagtccgccagggggccctggccctcgaatttccccccaatattggaaaaggagaggacggaggggggatgggccagggccacggtctggcggcccagacgcttgtcattcatgatgcgccacctcgcaattgaagaaagttttcgtagctagattgtcccaaagaggcaaaaatatgaggcccggcggaagccggacctctgaaaggtcattcctgttcatatcgaaacggcaggccacaggcgtagcaggaatgccgattgcccttctggcggcggccgcagcggggacaggcgatgacctcatctgtccgggcgggaaagacggcgggggcggcaggcgggctttcaactcgggtgccagcaggtgtgccagatccgctctccaaaacagccaggcgcgcctttaatgtggcgatctcctgatcctgggcgcggtcacgtcctacggcgtccgcacggatacgggcgatgtccggcagcaggagcactgccagcagaccgatcagctgccccaacaggcacaacaggaagctgaaccagaaggagtagcccttttcccggccataacggccacagaagaagctgatgactgcccaggccatgacgatcaggagggagagatcgaggcgtcgttcgcatcaaggttcagcgcagcaaacatagcggcacctcctgtacttattcatgttcatattgaaacggcaggccacaggcgtagcaggaatcccgattgcccttctggtggcggccacaccgggggcaggcgatgacctcctccgtccgggcgggaaagacggcaggggcgtccggcggacgcttggggggcgctgcttgagcatccgctgccggggcggcaggctccggggcgggcgttggttccaaagcctgctccagttcggccatccgttggcgtagagaggacagctcctgcttcagatggtcggactcgtactgctcctgcatccgatctggtagaagaatcagaataagcaagcaaatgagcctgccaaaaaagcccagcaggatacacaatgcagtggaataccctttttggcggcccacaatggcacacatagcggcaaacagcaggccgatcaaaaaggagatgagcattgcagaggacacggacagcagatgatacatacagctccctccttttgccccatcatagcacagaaaaaacgacttgaacagacctgttttcagagaaaacgggcagttagcctctgctaatgttcaaaaaactctgtacaactgttccgcgtggtggtataatcttcatctaatggaaacatcccggtcaggaggcgcataccatgaaagaagagatgcggacatttggatacctctgcccccagtgcggcaaaaccgtcatggggacccgatctgtctttgcgctggaggcatccaacgccgaggtggagtgcgcctgcggcaagtctgccctgaaggtggagttcgacgggacagagtaccacatctacgtcccctgcggcatctgcggggagacccatgaggcccactgcccgccggagcgggtgctccggggcgccaccgccctgggctgcgccaagacgcggcaattctgctgctttatcggcccggaggggacggtggagaaaaacctgcgggatctggcggtgctggcggagaaggagcaccagcagcaggaggacggcgaagaggcatttgtggacaacgtcatcatgtacgagatcctgtctgagctgaaggatatcgccgcccggccggatggaatcacctgcgcctgcggcagcggacggtacggtatggagatccgccgcagcgccgtggatctcatctgccgggactgcggggccaagcttcggatcccggccgccacggaccgggacttggacgatctctgctgccacatgaagctggtgatccccggaaagcggaactgatccgctccaccggtccggccatgggacggaaaagcgcaccctggcccaaaaccacgccgccgcagggcggctttttcctggccggagatgcccggctggatatagacaccggggccgcggccccatggaaaggaaggaacctgctttgatctcactgctggcgcggctgtttatcaaaccggacccggcccgggaagagccggagacccgcagggcctacggcgtcctctgcgggattgtgggcatctgcctgaacgtgctgctgttcgccggaaagtttctggcgggcaccctctccgggtccatcgccatcacggcggacgccttcaacaacctgtcggacgccgggtcctccttcgtgacactggtggggtttcagctggcggggcagaagccggactccgaacaccccttcggccacgggaggatggagtacgtctccggcctggcggtatcggtcctgatcctgctgatgggcctggagctggggaagacgtccattgagaagatcctgcatccggaaccggtggactccagcccgctgatctttgcgatcctctgcgcgtccattctggtgaagctgtatatgttcctctacaaccggcggctggggaagaagctggcctctcccgccatggaggccaccgccatggactccctcagcgacagtgtggccaccgccgcggtgctgatcgccacgctggtgggccgtttcacgggcctggagatcgacggctggtgcggcgtgctggtggcggcctttattctctggtccggcatcaatgcggtgcgggacacgctggaccccctgctgggcacgccgcccacccatgagttcgtccagcgcatccgggatctggtgatggcccacagcaccattctaggcatccacgatctgatcgtccacgactacggccccggccgggtgatgatctccctccacgcggaggtgcccgccaacgaggacgtgctggccctccacgatgagatcgacaacgtggagaaggagctgcgggagaagctgggttgcgacgcagtgatccacatggacccggtggtgacggacgacggcgtcaccgaggagacccggcggcgggtccagaccctgatccactgcatcgacgacgccatcgacatccacgatttccgcatggtagcgggacccacccatacgaacctgatcttcgacgcggtggtgcccttcggcttccgcctcacggaccaggaggtggagcagaaaatccgcagcgccgtgcgggcgctggacggcaattactacgccgtggtgaacgtggagcggtcctatacgtaagagaaagcagagcggcgggcgcatagcgcccgccgctctgctgcgccgatcaggctggattcgtgccgaattccatattggcgtaaatgcgctccatgcggctgtctgggaaatgctcgtcaaaaaacacatccacggcggagacgggggtctctccgcggacccgctcggaccagcggtccactgccagcaggctcatggcgcagtcgaagaccatgaaaatggtgaggacccaggtgaggaccttgccgaaccggttggggatcttcaaaatcacctgagcgacccggggatagaggcttttgatccacaggacgcccagaatgccccagaacaaagagtagagcaggcagatccggccgtcgaggttgaagggcatccgactgtaatcccaggaagtggagccgaagagagtctcctgcccccaggagagcaggtactcaatgacactgcccaccacagctccgccgaaaaaggagatggaggagctgcggttgcgatagcggtacagggccagggtcatcaccactgcgccgataccgtagacagggttgaagggaccgtaaaccaggccggagcggctttcgatatacccgttgcggaagaggcaccacaggatctccaccaccacgcccgcaaagctgccggcgatgcagatcaaagcgaccttgtaaaagttgacgccggaggcaaagctatctgcctgctcctcctccaggtcgataacggagttggcgggggcacggcggaagaggcccttgcgctgggagctctcctgcccctcccgcaggcgggtggtgagctcgtcggccttgtcggaggcccactgatgggcctgacgcaggcaggaggaggcatcctccagcatctccacctcccgggtcacgtcgcttcgcagggcggcttgctcctccggagagaggctttgctggtcggccagctgttcgtaatactcctcatactgaacttccagcgccttttccgcacgcaggacgtcctgactgcaatccaatagatcctttgtctgcataaaaacctcctgtcgaaatttgccgttgtgggatatagtagcacacggagggcgtgaaggcaagtgccgctccgttgtgcaggggctgcaggagtacaagaaaaaatcccgccacattgctgtggcgggatttttgaaagtgcaatcgaagaatcagcgcttggagaactggggagcccgacgggcggccttgaggccgtattgcgcgagtttttgagctgtttttccttgatattccgggcttttccggctttctgcttctcagttatccggtgtgcggaccataaaaaacggccttttttcattcagcgatagcctgatgaaacgcaccatttactaccccaaacaactcctctggtttattatacttcacttttgcatagatgtccatagttgttttgctgttttcgtgtccggcaaggtattgtactgtctttggatcaacgcccgcatagagaagattggtgatgtaagtgtgccgcagctgatgaggtgtcacatcaaagtccagcgtatatttgatttggggttgattcttctgggtcatacccagcgttggagtaaccgtatatttgatactctccccatttacatacttataatagttccggggcttagtggagcggacaacgacatactgccacactctttggaactgcgaggcagccagtggctctcctttgctgtcagcgatcacataatctgatatggaattttctttcgtttctctcagacagtccaccaaacacttcggtatcggaatatccctttttgctgccggagtctttagcaccgtagaaaccacgggtctgttatgctctgtacgccatgcccgcctcaccgatagataaggtgtatcctcgtccagaaacacacaatcccattgcagtgcaagaatttcttcccgacgcagaccggaatacaaaccgagcataataaacaaatatggaggaagccccttgactgtatccagaagcacggctacctgctgatctgtcaatgcctccttcttttttgtcggttttccgcctttaccggatattcccgcacagggattgtgttcaagaatttggtttctctctgccgcataaaaaatgcacttgagcagcatattgaccttattgtataagccttccgatttctttgacaatggaacaagagccagccgaatatcgtcagcagtcacttcttccatatacatctctcccagaggtttgatgatatagtttgtcatatccctcgtataacctctgagtgtagacgcagacacctttgccgactgcatcagcagccacttctctccatactcagctactgtcgggtgctgccggtgaaagataatttcttccaccttcttccgggcctctaactgcttctcatacaattcttcacaagtagcggcatacaaactcaactctttgccatctgcatccgtaatcctggttctgtaatactgaattcctttcaatgtaatggtcccatacttcgggatctgtgttttcttttttgccatctttgatcgtcctttcttgataatgtgtagtctccgtatctacactctctttttatcagaaagcctcgatttaatcaaagatacggctgatgtaaaacaaagagcgagacatccttgcctcgctcctgctttacttcctattttattattactgtgctgcgtcccagcttgcaaacgcgcaactcattgatctgaccagctcatctggtctgttgtacttaacctttgcataaatgtccatggtaatcttgctgctttcatggcctgccaggtattgaaccgttttgggatctaccgatgcatgaatgagattggtaatgtaagtatgccgcagctgatggggtgttacttcaaagtccagactgtaaaccacttttccgttatgagcagccttttcccccaagacaggtgtgacagtatgctttactctttttccatcttcataccgataatagctccgctccttgaccgtcctcgtaacaatatactgccaaagtcgcttaaactgcgtgtaggacagcggttcgccgtcccggtttgaaaccacatactccgaagtcgatgtttcctttgctgctttcaaacactcagccaagcaaacaggaagagggatatttctctccgcagccttggttttcaattcgtctgagattaccggtctgttgtgttctgtgtgccatgcccgccttaccgtcagatatggagtatccgtatccagatatactgaatcccattgcagagcaagaatttcttcccggcgcagccctgcatataaaccaatcatgacaaagacataaggcggcaaatctcggatagcatccaaaaggcgtgctgcctgttcatctgtcaaagcctgacgatcctcttgtggaacaccgccaccttttgtcgtgagataaatcgtcgggttatggtcaatgatcctgctttccatcgctgcgcgaaagatagatttgtaaaggattaccacagatttataaaccgatgcagatttcttggaaaccggaacaagggcaagctgaatatcatccaggctaacctcacccatccgtttatctcccaattccgctataatatgccgcctgacctttgaggtgtaatccgtcaaagtagtagctcgtacatgaaccgactgcatcagcagccacttttcacaatactctgcaactgtgggcgttttccgatgaaaagtggcattctcaatctgttccaacgcaagcgtttctttgttgtatagttcttcaggtgtttttgcgtagatagctacgagcttaccattcgtgtctttgattctggtcctataatataggacacctcttttcataactgtgccatattgaggaagcattattttcctatttgccaattcctccacctcctaagaatatactccagcgctgtatctatgttttatcagaccattatgatttcgacaaggatacggaccggctcacactccagctctgcgaggtttacgatatgttgcgttcttttctgctggctttgctctgtgggtgcattttgcgatatactcctgaaggcccgccgaggtaaagtacacacagccattctgcacatattgcacataagaaataaggccattgttacgggccgcgtccagcgttgcaatgctgatacccaaaatttctgctgcttcttttcgcgtaataagtttttccataaagcatatttcctccaatccgtcaagtttgtcatcgtgtttgttcaaaatcacatgaatacgctggcagccgaaaccaccagcgcatggtatctgattttgaacagaaagcggcaaacgcttcctatttatatttctcagctttcgtcacatttgccacgccccctgacgatgggaacacaataggtctccgctggcgcggatgtcataactccgcagcatcgttcgtaacgtgtgccgcagggttccccccaagtctttggcgggccgtgaggaagtatctttaagcccccatgtagtcatcgcgccaaatctgccaccattcttttatgaaatcgtagatcgctccgaagcagtgctttcatcacctccctgactgctccatcctcgcggcgtttcatattcgctcatacatgggtttatgtacctgttgtgctgtctattcgattgtcaatgtgcagatgaaggaggaaaacttgtccttcttattaacactgacaaaaaaggcaaaaaacaggcgcatcaaatgaaactttatcaaaaatattttccgagctgctttaagccacggcggatactgtctcgaacacggcttgggtctacaccttctacttcggcaatttcatttaccgtcattcccagatagtatcgggcataaattcgctttgcctgtttctccggcagcttcatcacagcggcatagacctgctcctgaaactgtttttcctccagaagcatctccggtgtctggggcttcatcagaatcgcattttcaatgccgttgtcgcagtccagggagtagtacgccttatagcgatacatcctccggtcataagcagcttccgcacgttcagctgctcgaatagtctccattacttcctctgtcacatctacaaaaaagtctgttggataaacatcaggataaagttcccgaaggttaattttcttcattatgtacctccatttcgattcacgggtgattgacgggtgaatcgaatggaggcggggaccgacaccggcagacaaccggatcatctccgaaaaaaaggcaacaaaaaacgccagatttccgcaatgggaaactggcgcaccaagaacagtcattattatgctgaatcacatggaacgataatgccgatgcaatgctatacttgcccggaggaggggcaatgctttttttaattgatgtagatcatgggagctttgaaaaagcaaaagagacacggcaaattaacctccaagcggctaccgtgtccctgcaagtcgtcattagtttgtgtaaacgcaaagaaacggcggctctgaaattgtccttcaaaaccgccgattgagttcaaaccttaaaatagcgcacgaaattatctgccccagtcaacggtttttttctttccccggacggggcagataacttattatgcagagcggagccgatgtgcgctaatcggttccttgtactttctccttcagctttcggaaagatgtatcactgatggcgtgttcaatccggcaggcgtcttgttccgctgtttcctgatcgacgccagcagcgataaactgctccataaaaaacaaatggcgttcatagattttctcggcaatctcccgacctatgacggtcagatgaaggaacccatcatcatccacggtcagaaaacctccatttttcaaaacgcctaccgcatggctgatactcggtttgctaaagcccatgtgccgggcaaggtcaatggagcggaccatgcccattttcttttgtagaacaaggatagcctccagataatcctccccagacgcatgaatcttcatcagttcctcctttatgcttattgttgaatcctccacccctcagcctgttcccgaatcttaataaattcctgataggttcccctttgagccagcaattccttatgggttcctttctgcacgacggttccaccatcaatgacaagaatttgatccgcattttcaatcgtcgccagtctatgggcaatcgttatgattgttttaccatgtgtcagtgcggaaatagcctcttgaatcaaatgctcattctctgggtcaatgctggccgtggcctcatccaaaataacaatcggcgcatctttcagcatggctctggcaatcgaaatccgctgcttttcaccgccggaaagagaagaaccgccctccccaatgacggtatcatatccatctggcaaggccataataaagtcatggcagcgcgcttcttttgcagcggcaatcatctgttcctccgaagcgtccgggctgccgaatttgatattgttacggattgtatcccggaacagatatacattctggaacaccatactgatattttttagtaagctgtcacaggtaaattctcgaatatctgtttctcctaaagtgatttttccggcgtcaacatcataaaagcgtgcaatcaggctgcacagggtagacttgccgctcccggagggacctacaatcgctgttgtggtattctgcggaatcgtgaaattcacatcgtgcaatacagtccgtttatcgtaaccaaaggatacatcctgaaaagtaatgtcatacgaggtcggtgtaatatcttttccgtcttggtcgatatattctgcattttccagagcttccagcttattcatagcggaatctataagacccagcatgtgagccgcgtcgttaatgttttccacacttccaaagattacgaaagaaaacagaacaaacatcaggaaataagcaagactcatttgcccgttaagtgtctgccatgcacagataaacacaatccccatagatgccagttttaaggagaacagatgcaagcagttaaatggcgtatagcctttttctactttgatatgaatatttttcaaatccgtatttgccttgcggaaactttcgatagaagccccttcctgtccgaacgatttaacgatggacagcccgcggatatattcaatcgcagagccagacatatcctccatggcctggtgcgtgatagcagcggtcttttcactatgcctgctgataccatgtaaggccaatgaggaaaaggcaacgccgacaacagaaatcactgctgcggctggactcaggaaaaggaaacacaggagaattgcaataaactttgcatgtccgttgatgatgatgtcaaccatcttcattccctgcaattcaagtgtggatagctccgtggtaacacctgtcagaatatcgcccacgctgtttttagaaaaatatcccagaggaacccttttcagcacatcgcctaaatggattcgctgccctgcggctacttcataaccaatgctttcctgcaacaccgcccgcaaataagagagtagaaagttaagcgcaatcgagccaacaataatccaaagcgtctgccagatcagggaggattctattgtgttgcctgcccaataagctgcgattgctttatcaagggcataagcggcagccattgtagggatcgccgtagacaggctgctgaaaaaggaaaaaacagagccaagatagaggcgtcccttatatttctccgcccatttaatgatccgtttcatagacttaaacatgagcggccacctccttcttttcactcacagaccaattcttcgccccgatgtgggctttccacatatccgcataaagcggacaccgcttcaacaattctttctgctttccgcaatccacaatccggccttttttcaacacgacaatctgatctgcgttctgaatggtggaaaggcggtgggcgatcacaagaagagttttaccctttgataacgccatgatagatttctgaattttatcttcgttctgcgggtcagtaaatgctgtcgcttcatccaaaataacaatcggggcatttttgaggatcgccctcgcaatcgcaattcgctgtttttcgccgccggacagcctctttccggcatcaccggcaggggtatcatatcctttgtccaaacgcacaataaattcatcacagcaggccgctttcgccgccgcatatacttcttcatctgtggcgtttggatttccaagacggatgttttctttcagggagcaattaaacaggaagttatcctgcgtcacaaaactgaccagttcggaaagctggcgtatagacaactctttgatattcttccccccaatggtaatgttgccgcctgtcacgtcccaaaaccttgcaatcagacgggcaatcgttgatttaccgccgccagacggtcctacaagtgccgtaaaacttccctctggcaattccaggttcacatcatgcaacacttcattttgctcggaaccgtcataggaaaaggttacatgcttcaacgcaatatcattgtgaggaatagatacgattttccctgaatccggcagtacaggcaggttcaaaagttcatttgccgcctctactgcatattccatagactttgcttcgttaatgaaagtggttgctttcatcaacggtccaacaatgctgagggaaaggataatccccattgcaagctccgcaggggagatacttccattctgcaccagcaaaaggccgacaggaagaacccccaggagcgttgtgggcataatcgccatcataaggttcatcgatttccatgtactcttaaaccatgccaaggtaaactctttgaacgactggacagcattaacaaatttttcataggagcttgtgctttggttaaaggcctttacaacctcgataccttccacatactcgataataatactgttgacgtggttatttgcctccatataagcggcgtactggctgttatagttcctcataaggaaaaacataggaatcatggccagcaccggagcaatcagaaccgccaatcccatgcgccagtcgataaccagcatccagataaaaattgcaacagggagtaggaggttagaggtcaattccgggatcatgtgtgccaaaggcggctctaagtcctcaaccttatccatgatgatatttttcagatagccgatccgccgccccatcacttcgccaaggggagctttcatcagccggtctgcaattttaagccggattccttccaaaatggtataggctgaaatatgcgccaggatcgtagagattccatggcaggcaacccgcagcaggtagcccgctgctccaaccagacaccaaatcagaatgccattcagggtcacattctgattgataaatgccagcaggatttcatatacagcccaaaaaggaataaaccctcctgcaacgctcagaatggcgcagaataccgaaagagccattttccccttgcatggtgcagcgaaggaaaacagaattttcacccaattatctttttgctgcttcattacaatcaccttccttctttttagtcagcaaagaaaaaaggatgggtagtctttgctaaccatcctcattgtagcagtattcaattcttctttcctctccaaaacggcatttatgcaccgtttagaaaaaagattttcggtattccatcggcgtctgccctatcacctgccggaaagctgttgcaaatttactggggctttcatatcccacagctccggcaatttccgcaatccctttttgggaatcctgccggagcattgtggcagcaacgttcatccgataacggcgaagataggaatacatggaatctccgaatatttccttaaagcaggttttcatccccgtcaatgaaatctggaatcgttcagctaattcatccatcgtgtaatgctcctgcaaatttgccgtaataagatcatggatcgctttgattttttctacctgccctttatagaaataagggcgatcttctttggaatcagaaaactgcaaagcgtccagatataaaagcagctccatggcttttactttatagtagtcacctttgatctgctgcgggacaaagtaaagctctgaaaaaatatgttcaattcctggctcattatgaatcacaaacggtttcttgtcattgcaatactttttttgaagctcgtacaaatcaacagaaaatccgccaaaaaagtctttcagcgccggcacagcaatgtccagatcaaatcccagggtcatcccatgatagtggcagagtggaaagcagaaccgtcccgaatgggaacgccggtcatccacacgcatctcatgctcttgcaaatagctatacgcattattgccaatctcgctttcgatccgtccctccctgcaatggtctatatagagaagcgaactgtccgtactactctgaaagtaggaggtacattctttcaggtgcatatcgctatacatcacaaaagcgccatcaaaaattttgtgggctgtcatggttccctcgccgctctcgtcaaaaagctgcaggacaacgcaatcctcagtttcaatgacatttttaacatttgagccgcagtttattttaccatcaaacagtttgatttccgccgcctccttccatcataaagaaattaaataaccgttcccgtccttccgtattctggaggaaatagctttcctccaatctgccgttttccagatggatcacataattgcagcacctgagtataaattcaggatcatgggtcacaatcacaatggtttttcctgaatcggcaagttctttgactgaatcggctacctgcctcatgtgaaaaagatcaaggccgctggtaggttcgtcaaatagtataaccggacgttcagaggcaatcgcagaagcaatcgccacacgttgtttttgccctcccgaaagccccatgggatggcaggctttgtacggaagcaaatccatttctgtcaagatagcctctgcctttgccacattttcaggcgattcatccgaatcttttcccggcatacttaacaggacttcctctaaaacgctctctgtaaaaagctgatggtttacatcctgcatgaccatatagcatagcttcagtcgctgtttgcttgaataggaagtaccatctttttggaggatacctttacatcttttttccaatccgcataagcaacgggatagtgtcgtttttccggctccattgtgcccgatgaccgccgttacatttccggcaggaagctctatattttccagagaaagcgtttccggctgtttcttgtatgcgaaatggaagtggttcagtttccatttcccctgccctgaatgtagactggcaggctcaatgtctgcaaactcacccaggccaagaggccgtaatcccattttagctttttccgccgccggaatcaactgaaattccggcaaagtataatccccttgtatttccccgtcgcttaaatatatgatcctgtctgccagatcataaagatagtagagccggtgctccgcaataataattgttttgccctgtgacttcaatatttttaacagtttccgaaaatcagcgatggaataggcgtcaaggttggaagatggctcgtccaaaacaaatacatccggttccacagcggcggcagatccacaggcgattttttgcttttccccaccggaaagggagaaaacacttctgtccagcagatttgtaaggttcaactgctctgagaccagctttacccgctttcggatttctgcttcttccaatccatggttttcacatccaaaggcaatttcgctggtcgtatccacattaaaaaattgagaacgtggattctgaaaaacagaacccactttttttgatatatcaaacagggaaagcccgctcatatcttctccatcaagcatgacagtgccttccagctttccatcgtaataatgaggaatcagtccgttaaacagccgtgtcagtgtggttttaccgcagcccgatgttccgcagagcagtacaaaatccccgtcgttaatagacaggtcaatatttcttaatgttccgtgtcctttcctgtccccaatgtcagtttcatttggagggtaggaaaaagaaacttttttacattcgatcataggcctacctccctgtaatcatcgtgacaataggaattgcaaaagccaccacacatagcagcaggaaaaaaacatcctgcacatgaaagccgatttcgcagatgtttgtcctcttgaccggaccgcccaatcctcttgtcagggctgctgcatttaattcttccccgatcttgacggaacacatgataacagggacaagcctgtattccagcattgcactggctttgcccccgccaaaacggattcctctcattttcatagcgtcccctatggcattatattcttctacaacagtagggaaaaatcggaatatcacggacataggaatgatgatctgctccggtaaatgcagcttcttcatggaggcaacaaactcgctgaccgtcgttgtcctgaccgtgatgtatcccatcataatccccggcacaaaccgcataaagaaaccgcagattgcaacaacaagaaagttaggaaggccggacaggtgggggagcgcccatagttgcaatatatagctgccgccatataaaacaaaatagataaccgatcccttccacgatttttccgtgagcagcaggatcaatggaacagcagccaaaataggagcaaactgtttagaaacagccccacctccgccgctcaagacaaagagggcaatcgtgacaagcaatgccaactttgtccgagggtctaacgacaggccggtttccttttttttgcttgctaacaattcacggcgcattatgcaatacccgcacgcttaaagtgctttttgaaaattttctggccgatcacaccgccgatcacgccgcaaacgaacccggcaatcaaaagaagggggagcgtatatgccgagatatagctcataatggaatctgcatactcttgtccataaccgctgattagctgctgatagtagctgtcccgtgttgcaacaatggggatgtagtttccgatgatccacatagaaaaaacaccatgcgatatgattcctttttttgcactcttataatcgccggatttcaaaacaagatcagccaggacaccgaacacggcaccggtaataatgctccaataccccatgccggtcagcaacattaaaataccgcagatcagtcctgtcagcgataccattccaaacttctggactttagaataatacagcatcattacgattccgccaatcagcggaaccagcacgatcagaagcggaagaaaaatagggataaatcccagcatggcaatcgccatcatcaccacaaaatagatcgcagtgaagattccaacattgataaggtcttttccttgtagtttattcattatttggtcctcctgtttgcttttgtgttagcacgaactaaccgcatttcagtatagcagatatgtcagtatgtttcttctccaaaaaggcattttcgctccaaatagacaattactttgcttttgctatctttacggggagtgattgcctgcgtgtgtgcgtgagcatagaactattcaacattgaacagaggcggttcttgcataatttgaaatggaaacagccaaaatcaccgcttcaaattgtagtattagtagagggagaaatagaaggtagggtttcgatagcaagcacagcaagcgagtacccgcttgcgatttttcggattttcaggtcccttgcccgaaaatgaaaaatgtttgttgggataatctcaaactcttatgaagaatggaggcagcgcatggcgaaccgaaaacggaatatccagatgaatttttatgtcacagagaataaaaaacggctcatagatgagcggataaaactgatagcctccctaccgcattctatatcattctcgtttggcaacgaactaaaagctgaaatctgcaattcatcctcatagttcaattagtagccggaaacgccataatcatggagcaaccatgttatcaaaaaggaatcggcataatcagtcctgttctcaagcacaataaggttattcctttgtgcaaatcggaacgataaaatatatttgaggtgaacgattatgccgattgatgatttaactgctttagggcaaaaaatgcgggaagccagaaagaataaagaactgacacaacaggaactttccgatctaagccatgtttctgtaaagcaaattgccaatatcgaaaaagggaaaatgaacccgtcctatttgattttgagagcattggcaaaagtcctgcacatctctttagatacgcttataaatccagatatttctctggaggatgagggtgtcaatcagatgaaaatgctttattccagctgtccgccagaaatgcgtgacaccctgttgcatcacacccaggaaacgatgaaagagctaacagagttgtccgagaaatttgaaatgaattgagccagtgagtgaagtttaacgattttctcactggttctttttatttccagagaaaagaggcaagcaatgccggtgttaatacacaccgacctgcagagaagaaaatccctttgtgattttcctctccgcttgcttgttgagggcagcacccccaagcccctttgaacacagaatttcattctgtggctgcgcgttctgcgaacgcttttgaccaggaccagcttaccgctggccgtggtctttttctttttcaacatcctgttctacctccattttcaggacccgatccacattggcctttgccgttaaaagctcccgcatttcttcacgggaacgccggtactcggcataggtctttttcttttcttccagcaatttcgcatactctgtctgcaactctttgacctttggcagcttcttgacgcccatctcatcaaaggcattcttagcagcttggtggagcagaatttcttcctcatgttcttccctgaatttcttagagtaacccgccttgcggtatgccacatagacctcacgggttttggcataatttacgatgtgagtacgcagaacagcgatctctgccatgcgcttttcagccgctttgatctgcgccgaaagttcattgtgatgtgccgtggcagccgcagccttttcttccaaaaccgcatactccagcaggttatgctctgacaggtaattcatggtctgcgccatctgtttgaggttgaacaccttagcccatcgagcatagccagcgccttttccagcctgcaattttgcctgaatgtccaccagcagattgaccttcggcggcactgcctgtgtgaccgttttctttcgtggggtatgcgttttcttcccagaaagaactgcctgtaaatcttccaatccatatccttcgcccaggctgtccatacgggctgctttctcccaaccggggagcttcagacgatacgattttccacgctttgatacctcacagccggactcttgcagcagcttcagcagctcctcaaaattagcaggactttgtgataatgcgttgtcaatcgccacacgcagcagctctcgatgagagggctttgcctgatctcccagccacttgttatagctttttccgtgaggtttcggattctctacaatggacagtccgttttcaatgcagattgtatcacttaaccggcgaaccgccttggtgctgccccaaaagtttcggaatttccggtcatattctaagctgaccgatgaccagataatgtgattatgaatgtgcgacttgtctatgtgagtgcagaccacaaaggcatgtttgcctttagtaaaacgctttgcaaattctacgcccagccggtttgcttcttccggggtaatctcaccagggcggaaggactggcgcacatgataggctatcacatcatctgcgccgcgcacccgtccggtagcggcaatgtactgccgctttgccagaaggaattctgcatccgcagtccggctgtcgcacgcataactggtaataagtttgccgttatctgttttctgtggatttgctacatagtcgatgatgtcactgatcgcccgactctctgtgcggcctttgccgacatgaagcggcatgattcttgtagttgccataaaaagccctcctcgtataataagtttcaaagttaatagtttcaggtatcagcaggctttgaggtgcccgtgatacaatagctgtaggacagcagggtcaagttctgagtcctccggttgagccgtaaggctacttcactgaaagtctgttcccctgaaccggaagttagctgcaaactcattggctgtttgcctgggacaagaccgccctttcagcagtgagggctatcgcattggtctgcccaggaatgattctgataagcgagggtgccagatgctccggttatcatgggtatctcaaagcctgctggcctgaaatctccatgcggggaggtgaaaattgtgaatccactattcgttggcattgatgtgagcagcaagaacaatgtggcctacctgatgaaaccggacggcagcaaacactccagcttctccgtgcagaataaccttggcggtgctaaactgttatcagagagaatcgtatcggcacttggctccatgcagcttgagcgtgtggtgattggcctggaggccacctccatctacggggacagcctagtctatgctcttcgtgaggatggccgcttggggcggtttcagaggaaaatccatgttctaaatccaaagcaggtgcggaaattcaaggaagcctattctgacctgccaaagaacgactgggtggacgcctttgtgattgccgaccatctccgtttcggcagaatcaacagggaggtctacatggacgattaccgctacaaagccctgcaaacccttaccagagccagatttgatgtcatccaaaacttgacccgggagaagcagcggttcgccaactacttattcctcaaatgctccggcatggcccaggacaaagacattcagaacaccagcgccaccaccatcgcactcatggaacactttgaaaccgtggatgacttggcgaatgccgacctggaggaactgactgcctttattactgaaacaggccgtggcaaatttgctgacccggatgctaccgccaaggcagttcgggctgcagccaaaggctcctatcggctgcccaaaacagtaaacgacactgtaaaccaagcaatggctgtttctattgcctccatgcgcgccttgaaagggcaggtcaaagtattagataaggccattgaacagcagtttgaaatcattccgaacactttgacctccatccccggtattggcaaggtctactccgccggtatcattgctgagattggtgatatccaccgttttgattcccaagcctcggttgccaaatacgccggccttgtctggaacaggagccagtctggcgacttcgaggccgaacactccagaatgattaaatccggcaaccgctatctccgctactacctgctggaagccgccaactccgtgagaagatgcgactccgagttccggcgttactatgacctcaaattcaaagaggtcaacaagtaccagcataaacgcgcactcgctttaactgccagaaaactggtccggttggtctttcggctgctaaaggacaaccgcctgtatatcccgccggagggctgagagcgcagcttgccactctgactcataggccctgtttcaaaatttctcagggacagggctttggttggtgttgcctttttgctgtctacacagtgctttttactctgtttcgcttaaaattttcttgcatcacctacttgacttcataccattggactttcaaaatattttctctgaactctttgtgcctatcgttgaaataaactctccttatgggtataatataaagaaactaccaatacctcaaaggagggattttatgatagaacagctcattgctgaagcaaccgaatgtgatttcaaagttgctctcgaaacaaaaaagccaaaaagctggttaaaaagtgtcagtgccttttccaatgggatcggcggcactctgtttttcggagtctctgatgaccgggagcctatcggcttgtcagatgttcaaaaggatgctgaagcgatcagccgcttaatcaaagaacgaatcacaccattacctcagttcatcttaaaaccattacaggaagatggtaaaaatctattagctctggaggtttctcccggccgcagcaccccatattattacaaggcagacggcgtgatggaagcatatatccgtgttggaaatgaaagcgtaattgcccctgattacattgtgaatgaactgatcttaaagggaaccaatcagtcctttgataccctaacaacagacgcggtaaaaaaggattacagctttacacttctggaagcaacctatctggaacggaccggtctccgctttgagccatccgattatgtttccttcggtttgactgataaaaatggactcctgaccaatgccggaaaactcatgaccgatcagcacacggtttataactcccgtatgttctgtacccggtggaatggcttggaaaaaggctctatctttgatgatgcgctggacgataaagaatacgagggaaatttgatttatttactgaacagcggcagtgaatttattcgcaataattccaaagtccgttttgtcaaaaaggcacagtatcgtgtagacaagccggattatgctgaacgagctgtgacagagactcttgttaatgcgcttatccatcgtgattatattgtgcttggcagcgaaatccatattgatatgtttgatgatcgggtggaaatcacatctccgggcggtatgtttggcggcggctcaattcaggaatacgatatttacagtatccgttccatgcgacgaaaccctgtgattgctgacctgttccaccgcatgaagtacatggaacgccgtggaagtggcctacgcaaaatcgtcagtgaaactgaaaagctgcctggatacacagcggcatataagcctgaattttcctcaacagcaacagatttcagagttattttgaaaaatgtgaattaccatcttagtcagaaagacttagtcagtgaccaagattgtgaccaagttagtgatcaagataaatcacaggacatcctacacgcagtcttggatttttgtataacagaaaaaagcaaacaagaaatttgctcgtttattggttatcgaaatctcacttattttacaagaaaatatttgaatcctctactggcaagtggccagcttaaaatgactattccagataagccaaacagtcgaaaacaaaaatatattacagttcgttccgaataaacagagaagcagggcattgggtctcatctcccattgtcctgctacttttcattctaaattatattcacatcatttacccatacacccaatcctggattgcaaatttcaaactctgtaccttgcccagcagccagatcgcagccagcggcagccccatcgggctaatcaaaaaagctataaccagcaaaatcacaccattctgcggggaataggtaataagcacagccacgccaagcagagcaattaccgtgctgagcagaccaagcaccagaccggatatgtagatcagccccatgcagagccagacaaaaagcgtcaacaccaaaatgaccggtgcagttacaatcatcagcaggcatttcaaaatcttcattccagttctcccctccaacgctccagataccgtttgcacaggacatccgcttctctctcatcatcttccgtcaactcccgtctgcctttggtcagttcaatctccacataagtccggtaatcatcagctaagagattgaacagttccttgggagtatggcacacctcgccagagcaatagtgaaaatcctggtcaaattcaacccttacacatccatggcggctgatataaacttcgatggtctcgtctgcggtcaggtaatccgcaaaaatctccaacactttttcaaaggtcagcatctgttttcactcctttgcttcactttttattctactcatattatccggtacggacagtcaaaaaacaaggataccgccaaaaagaaaaagcggaggaaggtgcggcgaagaaacgccgttcctccctccgcaaatggagtatctatccctgttatgaaagtttagaaagctgagtaaggatttgactcacaccctcccatagctgttcctgccgctgggatatatcctccaagtcagcatcataaacccgcccggtctcatgcactttgcgggtcagctgatttaagttgttgctgcttcggcgcatcagggaaaccaactccttcagctccggcagatccagtttgaccacatacccatccagtgccattttccgcagataggcactcagattttctgttccgtattgctgcatcttttgatggatcaactccagttcctctgctgacacccaaaacaaaaccggcacatcccgcttgcgctttgccatggttatcgctccagctcccgttttttcggggcggcagacttatgggcgggcagctcttgtttgagcttatcccgtactgagggacgggacggttccagtttttctctctgggtacggctgcgctgctgttcttcacgcaccagatcaataaaaccatccagcacagcagggtggctgtttaaggcataaccacaacggacggtttcgggattatcattaggaatggtcttggcccattctttgttgcgtcgggagtagcgcccatcccagtcctgaagctggaccgtgttagacagaaccatagatacacgctccatgccataggtctcgatcacaccctttgccgcatcgtggctgagatacattccgtcgaagtgttcccgcaccgccgcttcaatggactccttgcattggagatttacattgttggaagctcggtactgctccagctccccatgttctctcgcataggcagcagaatgcggatagaccggtgttgttcgcagttcctctttagctctgcacacatcgtcggcacggttctcaatgctgtcccggatcacatccatatagccggtctccagcttttcaaaataacggtacacatccgccagcggcgagggagattccaaaagcgcctgggcctgtgcgtcggtcagctccagctcctccattgccatcacgatgtcctcccggatggtgtactcataggcatggtttaagacttcttccgggggctggcttttcagccagtcccggaacttgtcctgttcggcagccatcttttcataaagagctgtattcagatcgttagtattcatgttatcgcacctcctcatgctgctttggtttcttgtctgtactgcggggttgcaccgggcgttttaggttatccagcaccgaaggccgtgtgcttttggcaacaacagactcggtgtgtgcctgcccctttccgtcgatgttgagcagggtatccagctccaccagacgggcgtttttgcttctcagttcttcttcataaaggaatggctttccgacttcctcctttgcggcagcctgctgctgatagaggttatccagctgggcctttgccgcctccagacgctggggcatctgggcgagggcattgtcgatacgggtaagatttccgcgagggtctgtaccaagggttgcccggtgggtcatctgtcctttcagcaggagcgtatactcctgtttccaagcggaaaattccacggacatggcataaccccggtagttgccgatctgcaccggatcggaggttttgacctccttgcaggcatccaaaagggctgcaccggcgttctccttatcggtcagcaggtctccacgaatctccataccagcaaaaccgtcctccgggtgcgggtgagctgccaaaacctccagatcggattcaaagcccttgataaaacctttgtgcttttcaatctcctccgggaagtatttgagcagctggtcctccagacgatattgcttgctctggtggtcggctttcatcagtttcaggcgggatacctccacatccaaatccatacgctccttgatacgggggtctccagcacacaaagccttgatctcggcaaaggaaagcgccgtttcatccacatcatcgcaggagcgcaccggcgatttagaagtcatgatctgggaaatgaatttctgcttattctccaccgtctgccagaggtatgcgtcaaaggttccttcggtcacatagcggtacacatggacaagaggattctggttgccctggcgctcgatacggcccttgcgctgggcaaggtctcccggtctccacgatagcgataggtaaggtctgagcggtgcgccagcaccgctttccaccttttcccccgcttcacaccgtgcatgcgagtttccccgcacacggcgttccatcattacaaaagaatcattagaatagtaagaatttcaaagctaagaaactgtattaaatctcaggctgtcctgtcagaactcgcagggcgttcagttttgctaatgcctttttatcaagttggaaaaggttcaagtacacgacaatggtatttgggtctgtagcatgaatcagtcggtgaatatcccggtggacaattaccagattcatatacttgtctgtgccgcccctgcacaatggctgtttgtggtgacaatgtatttcatcaagccaaagctcttttccagtcacagcgcaacgcccgtattgtgcggcataaagggaaatcctgttgtccatgtactcaacacttcgtcgtggctcttttatgcgcatcagcgcaagcataatcgaagtgttgatgccaaggttcttgtgaatttccgctctaccctccggtgtgtatttacaaacctttttcttcttgaacaatggggttttggtctgaatatatccgacaggtgctacggttttactgctgataaagcgaatttgtttgctatcaccgtaattcttgcggatatagacctcattgatttgcccctttttcgtaagcctgccataaagtctgttcttcatcactgtagacactgcccggtgtatctgttcacaatccgttgcaatcatggttgcatagcggtagtagttgtgaattccgaataccatcgaattgtacagagtaatttctctggcttcgtcatctcggtcttgaacatgggcaatctgcttgacctgctcaataagagcggctgtttcttttgaaatggctttttcagtcatatgcgatttaaccacataccgtttccgcttcttgactgctttcatttcaaatccaagaaatttggagtagtgccgtttcagattaacgattttcgacttttcttcactgatttccagtttgagccggtcttgcagccacagttttacagcaatgaatactttttctgcatcactgcgtttccgacaaaataacttgaaatcgtctgcatagcggacaatatgcacttccttgagtttagtggtatttttgaaagcaccataaatcgccgttttattgattgtgccatttggccgtacttcacagctatactcatatttggtgggcatattctcccattgggaggcaatccaccaatcaagttcattcagtacgatattcgataggagcggtgagagaatgcctccttgtggcgttccttttactggatgctcaaccgttccgtctggcataataatcggtgcttttaacatctctcggatgatgcacaatagctttttatcccgtatacccatatgccaaatctgctgtatcaattttgtgtggttgacattatcaaagaaacccttgatgtctacatcgaccacaaaatataacttttgcagatttatcatcttgtagcactgtgcaatcgcattctcggctgaccggtttgggcgaaagccattgctccgctcataaaatttagcttcgcaaattggttccattacctgcaaaatacattgctgaaccaacctacccacgattgtcgggattccaagaggacgcattttgccattgggctttgggatttctacccgcttgacaggctttggcttatagtacattagctttctctgcacgatacggacatactgctctacaggaagtttttcaatatccctgatagtttgcttgtctgtaccggctgtatagctgccaccattccgctttatatttcggtatgccagccggatattttcttcgctgctgattatgtccatcagctttgtaaagattttaccttgctggctttccgcatacagtcggtcaaatactggctgcaaatcgtagtattctgagtgccttagtttcttttgctttgtcataggcaacaccccctctgggctgtttttctttgtcatactcgaagctatgaatgttcttacctataactattttttgtaatgactggtggctgttgctccgctcccattacaggagcatctttgctcgtgccaccactttcacagcaattaaaggtgcttattttcttcgtcaccaccgcaatcatgcgttatgctgcttcccacgttccgataattctatctatacatatatacttaggtgcttgctctgagcctgccagtccaacagtgcctgtaacactgtaaggtgtttcgtaactgccatttctactaaacctcgctggctgccgtttttcagaccggcgcacatttctatacgctcctcggtttagacccgtacattcgtaagttcgtcaggtatttctaccattctcaccatatatattttgtagacccccggcatataggtcacagcctccacctctggagacctttcgtttgcgttgtatcacagccgcaattacggtgactctctgccgacttcaccgagcttcagaccgcatttctgccgcctgtcggagtatcagagtaggcatttcagggcgttaccccgtcattctacctatcgaattatcagttctataaagcatagtcctgcggctcctttcaatccacagaatatatttttaatgtgctttacgcctaaccttttcagttaggaacgtgtcgcacgacagtccaggtcatgaagtgccaccagacggtcctgcacattggtgcctgcgcccatcttggcggtgctgcccaaaaggacacgaacctgaccggtacggactttagagaacagctcctttttccgcacttcggtattggcttcatggataaaagcgatctggtcggcaggcatcccctgggcaatgagtttctgacgaatatcgtcatataccgtaaagaccggttcctgctccggcagaggcacagcgccttccaatgcgtgaagcagtggattatccagcgttttcgccgccttgcttgcaggagctttggcctgtggtgtagaaatgtcgcagaacaccagctgggtcagcttgtcagctttgccgtcccgccagatctgcatgatgttgtccacacactgattgacctttgtgccaggttcgtccggcagcatctggttgacgatcctctggtcaagccccagcttacggccatccgaggtaatcttgagcatgttatcctgggacgggtcaacagttccgctgtgtaccagcgatgcacgctccgaaagagctttgaccatttcctgctgatgttcggtaggctgcgccacgatgttgtggtattccacttccggggtaggcagattcagctggtcggcagtcttaatgtcggccacttctttgaacaggttcatcagctccggcagattaaagaacttgctgaatctcgttcttgcccggtagccggtgccttccggtgccagctccaatgctgtgacggtctccccaaatcgggaagcccagcagtcgaagtgggtcatgttcaactcttgcagacgttcatactgaaggtaacgctgcatggtgtaaagctcggtcatggagttgctgaccggggttccggttgcaaagataacgccacggtttccggtaatctcgtccatatagcggcacttggcaaacatatcggaggatttctgcgcgtccgatgtggaaagaccagccacattccgcatttttgtgtatagaaacaggtttttatagttgtgggcctcgtccacaaacaaccggtccacacccagctgctcaaaagtcaccacatcgtcttttcgcccctcggcttgcagcttttccaatctggcttccagagatttgcgggtgcgttccagctgcttgacagtaaaacgctcgccgccgctggcctgcacctctgcaatcccctcggtgatctcgtcgatctgttcatagagaagcctttcctgacgctcccggctgatggggatacgctcaaactggctgtgtcccatgatgatggcgtcgtagtcaccggtcgcaatacgggcgcagaacttcttgcggttatgggtctcaaagtcctttttggttgtgactaagatgttggcagaaggatagaggcgcagaaactccgatgcccactgctcagtcaggtggttgggaaccacaaagagagatttctggcacaagcccaggcgtttggcttccatcgcagcggccaccatctcaaaggttttgcccgcgcctacttcgtgtgccagcagggtatttccgccatacagcacatgggcgatggcacttttctggtgttcccgcagggtaatggccgggttcatgccgccaaaagtgatatggctgccatcatactcgcggggacgggtagagttcatttcttcgttatactggcgcaccaaagtctggcggcgctccgggtctctccagatccagtccctaaaggcttcccggatagcctgctgtttttgggcagccagagtggtctccttggcgtttagtacgcggcgctcttttccgtctgcgtcctctatggtgtcatagatacggacatcccgcaggtttaaggaatcctccagaatcttgtaggcgttggcgcggctggttccgtaggtggtataagctgccacatcgttgtaggatacagaagatttccccttgatctgccattcagcagtaaaggaggaatagttgacctcaatgctgcgctggagataaaacggggtgttgaaggtctcgtacataaactgctggatgtactccttgtcaatccaggtagcgcccagacgcacctcaatttccgacgcatccaggtctttgggctgggcggcggtaagagcttccacattgactgcaaaagaagggtcctgctgtgccgcccgctgcgcctgacgcagtttgcggcgtacattgccggaaaggtattcatcagcagtcacataatggggtgtgccgtcctgttccagctgtcccggcacacggaagatcacgccttgcagttctccggccagtgcttcttttgtttttccggtaagccgactcatatagctcatatctacgcaggctttttccgagatggacaccgccagtgcttcgcttgccgtatccacagtagccactgcctgatggggcttgatggtccgtttggtgaacatgtccgccttgcgctccagctttccgtcctcgtcgataacttccagcgcacagagcaggtaataggaagaatcatctgcataggccagccggtttgcacggtcgttgatgagaccgtatttggcagaaaagctgtcatagagtcggttcagttccgcctgtttttgggtaatgatgctgtctggaaccgctgcatccatctgaaggtcgatcagttcctgcacacaatcacgcagtcccacaagacctttcacacgggcttcggcggtagcgttgagatcagggcacaccatgcggctgttttcccggtagtacacctgcccgtctacaatggcataagaatagttcttcacattggggtcggcaggaatggaggtgtcaatggcttcgccctcgcccagctccggcagctctgcctcctgataagtgccatgaatgtacttcacagcatcatgcagctggtcggaaagctccagtccctcgatagggttcacggtgtaatccataccatgagcagtgcttaccggttcctgtctgcccagcaccatttccgggtggtcgataaaataccggttgatggcaaacccatcctccgtttgtccggtctgagtccattccggcgcgatgtccagcggacggtcccgcttttggagaaagatgatgtccgataccacctcggcaccggcattctttttgaacgcgtcattcggcagacggatagctcccagcagctcggcacgctgggcaagatagcggcgcacggtggaatccttggcgtccatagtatagcgagaggttacaaaagccaccacgccgccgggacgcacctggtccagtgctttggcgaaaaagtagttgtgaatactgaaatttagcttgttgtaggctttgtcattgacctgatactgaccgaaaggtacattgccgatggcaaggtcaaagaagtcacgcctgtcggtggtctcaaagccgcctactgtgatgtctgccttgggataaagctgctttgcgatgcgcccggaaaccgggtccaactccacgccgtacagatggctgtttcgcattttctccggcagcataccaaagaaattgcccacacccatagacggctccagaatatttcctgtctcaaatcccatacggtccaccgcttcgtagatggcctgaatgaccgtagggctggtgtaatgggcgttgagggtagagcttctggcggcggcatattcctccggggtcagcagttcttttagctgggcatactctaaagcccataccggtttctccgggtcaaacgcatcagagagaccgccccagcccacatatcgagaaagaacctcctgctgttcggggcttgcctgctgtccggcagcttccagctctttcagcaaacgaatcgcattgacatttgcctggaacttggctttcggaccgccttcgcccaaatgctcatcggtaatgcggaagttttttgcattgcggcgcaggttagccttgtattcctcataggaggcttcctcggcagcttcggcattggggaaggtctgccactggccattgacctgaatggaaaccgggtgttcgtccagcacttcctcaaaggttttctccggctctgtcacaggcgctggtggctccggctcctcgatatgcagtcgttccaccaccacatcataaggcagattgttcttatcgcccggatagacggccatggtctcggaatggaaggtcggggattcggcagccggttggggctgttcctgtcccaaaccgtcctgctgacgggcgtacatcccgcgcagcaaaggtgcaacctcatcccagcgaaaatacagcatagccagacgcttttcctctgcatccatgacttccagttctatgccctgtgccgtggtacggtaatcggcaatatcgccggtctccagattcagtgtctcgatctcaccggaataggctctgctcagccagtaggcgatctcgctgttgctcctgccggattgcagcagcgtggaaacctgttttttatctgcttcatccatcagtccatgagccaatacatcccgcaagtcctgatctgccttgtccgggtcaataggaagaaactcggtatagtaagcattgcggcggtctgcccgaagcagctgctcgaactgttctttgcgctctgcccggtagatgggatataccatcccggtgggcagaagctgtacggtgtcctcccgtagctcggtgatctgataggcgtcatcctcgatatacacggtatcgcccacggcataaaccggggcggcaggatcataggaggttctttgcggagtcgggcggcgaactgcatcatattcctcatcggaaatggaaacctcggaagtctgttctgtctcggcagctgcgatctgctcggcatccgacatcacctgttggataaacgggtcattgtccagtttttccgggtctgccacctgtccgttgacgatccctctttcctccagggcttcccggatggcgatagggtcgatgtcgtcaaaacggttctgttcttcttcggtatagaaccggtcctcctgaatgagctgggcaatccggcgctgtaccttcggccagggcagctgcgtttcctccgggctgccggcacggacaacgaacaggctgttgctgttactgccgccgtattcctgagccagccatgcggcggtatctttttctcttgcatggtctttcatatagcggacaacagcgtgtttactctcaatattgccgttccatgcacaaagggcggtatcaatatcctcctgagaaagagggcgcagacgctcatggagctttggataggtttcgtcgatcacttcccggtgcagacgctgacggaactccggcacatcggaatagagccgaatcagctccatatccttagagccaagaaccgcacggcgcacagcggcattgccctcgatgacagcattttcacggtcggaatgaccgcaggcatttcgatatgccacatcctcagatatggcggcagtcaccacaggcttatactgctcaaactgctcccgaagggtaggctttggcgtttcttcctctatctccggctgctgggcatgaatggcatcttcttctgccagatccttttcagcctggatcttgtcatactgcgcttgttcctgttcggtaagatagcggcctttctggacaagtgaagtaatgcgcttggcaaccttttcccagttcaagtgaacatccgggcagtcctgctttttatagtgcagtcctttcccatcgtgatcttcgccgctgtgtgttgcgccggacagggcatgagagcgtccgccaatgccatactcgtctttaaggaatctcactttttccttatccgtatggttttccatgaagaacgcatagatacggccctttcctccggcaaaactgctgccgccggtcatggcggcgtcgatctcatcctcggtaatgaaatgctggacggttggcacttgggaaagatccgaagaaaagttctgcgtggcaggtcaagatccttcaggttctcccaaatttcccttggcctatggtaatgaaagcgcaacaggtcacggtcctgctgataggcagtccagaaggcggcgtattcttccttgagggtctggcggaaagccgggtcactcagctgctcggcaagccatgcagtttcttccgggaacccggttctctgaataccggacagacaggacagatacccggaatctctggctttatcgctgaaatcgtggtacagatgccaaagtttttctgcaaggagggagcgttcatagcctgccgcttctgcaagctccacattggaggcaaactggccactttccaaaagttccccgatgcgctctgcggcactctcccaggaaatgacctgggcagacctgtcataacggacagacttcccgtgggaaagatggataccatcctcggcataccatacgctcacgctgccaaggccgttgccgccgtggtacagcgttttcagtatctcggcaatctcagcggtggttttctgcttttcaaatgctgcaaccacacgctccctctgacgatctgtattgcctcccaaacgcagcacatggtcaatatcattttgggcaaaagaaaaagcagaggatgtatgcgctacattctctgcttcatctatggattggatctgctccgcttcggagaggaacaggtttagggtcagctgttgataagctccgccatcaggatttcctcggcctgagctttgcaggtgttcatcagccccacccacttcatgggatcgctggctttcagttcctcggtggctcccgcttccttcgccagctggggcatcatctgctccagtctgctctgggcggtctcgtcgatctccagaaggtgcgggtacaacttctcgctcagcaacatctggttgtagaggatgggacgatgttccttcaggtaggttttcctcatcctgccgtacttgcccaagggtttctccggctgctggctcaacttcaggtcgggaatcagatagtctccgttctggatataggtcatgggattgttcatcttgtttgctcctttcttggttggcttcgcgctctgcatttcggacggtaacgccgatctgccgcagcacctgctggttgatctggctgaccgctgttcccagcgccccgatggtggacggggtattgaaatcaaagatcgccatgaaatcttcgtggtcgaagtagcgttccggctccagtccacagcgggacatcaaagcgtaagtgatgctgacggtggcggctgccttgaactgcactccgatgttatactcatcatattcctccaaaaaggaaccgtcaacgatatagaagaagtcctgctgatgctccgtccagtattcctcggccagttttccggctacctccgtgagctgtccggcaaggtcatcaccggaaacatcataggtgcgctccagcatggcctgcacggaatccagatggcgctcctccaactgccacagccagggagtgcgggaatgttcacgggttccggtgtcggaaatgtcaaagacataacgcaggcgaggtctgtccccggaatcatccaccagagcgattcccttggaaccgcgccttacataacggcccatcttttcattccacaaatcgtactccgcacaggcggtggcgtccggtcgctgggcatagatcatcagctgctcatggaacgggtacttgtaaaggcgggaagcagtagtgagaaaccctgcccattcctgccagctccccgtgagctgtgttgccaccttgtccgccatctgcgcatatagttcagctttggttggcatagtgttctgtcctcctttcaattttggggtaaaaaggcggggtggcagatcgccaccccatccctgcggttatgttgtttactggtcaaaatccgggtacagctccagttcggcaaacttctcatcggtcatcgcacagagcttcgtaagggcgctgtcggtcaactctctcagctccgtttcctccggcgaaagctcgccgcgcatctcacgcaaactgtcaatcagcccggtgcggctgccggtattgtaaatgcacatcaggttcatttcctcaaaagtaaagtttcccatatcaaatctccctttccgcactctttttgggtgctgtctttttgtgttctgccttgggctggcttttcagctgctccatgacggactttttcttttcccgttcctcccgatgggcagcggcagccagatccatcagggaaatgggctgaccgctgcgggcctgctgttccagctctgccaccgtaggctcttttgcgccattgttgatgataccgtcgatcatgccgtaatcgtcctccacgtccatctccgcatttttcagcggattttccggcaggaatccggggatctgggtaaaaccaacactgtcacagtaatgacaggataccttaccatcctgcttgatcgcaacgatgtcgctgacactcatggagggactatgaaagtccacgggcttttccagattgaattgctgatagagtttctccaactgctccggcaccgtgccagacgcacttagcggagctgtgtaaatgaggtcataattgctgcggtctatggaaatgtcatgggactttaaccaatccagattcataaagcgcacattctgcggatcgtcacggctcacctgatagatggcaaagcaatctctgttctgagagagaaatgcctgttcgcgttcctgctgatgttcctgacgctccatgaccttttcgtggaactgagggcttttctcccattcctcatggtccacaccgaaaagaccgccatgatccatgatttcctgcgggtcaaacaccatgctctccgtattgtcctcatgcagcacatagacggtcaaaccggcggcatccagttccagcgcccgttctctggtaacagggagcatcccatcataggagtagccatattcctgcatatccggtgtggagacctgctcatccggcatggggtattcatccagtgcctgctcctgtgcctccggcaactgggaagaagcaatcatctgactggtctctgcctgcatttgctgataggccgcttcctgcaaggtctcaatcatggacataggagcgtgtctgagcgaagtgctgtccagattgttgtcatcacaaatctggagaactgcatttttgcgggaaagctccggcatatccagctgaccaccatccagctctttcatggatgcggcatcgtaaagggtatagtcccatccgctgtcacaggactggatatgaagataggtggcatcgttgatcagaaacaaagcctcctgctggttggcatccgccccagcacttccatttccggcatggccgcagccagttcctttaccgctttttgcaccaacggattatcacggtaatagtcgattgcctgaatggtgtccaggtcaatggtctgtccggtcaaaatcggaaacggtccttcatagtcgcttccgtctttcagctcaaacccaatccctttgaccccgttcattcgctctgccggaatttcctgatagatgcggaccgcctcctccaaagacaggttatcgtgatattctccaaggtttgaaaactccatgcactctgccacatagtaagtcagattgccggttggctgctctatcggggcggtttccggctctgcctttgcatggagatcaatcccacgctctttgcatatttccttatagtggcgctcaatgtcagagatcaaagtgccggaggtcttattgatggtctccaaactggctctcagctctttcagttccttgccctgactccagcttgcaatatagccgaagctgttttctccggtctcaatgccaaaatatttgcagaccgcataggagatgctttcagcctccacttcctccgtgtggcggtctttcctctgttcttgtaaaaactgggtgagggtagaaaagccgccaacaaaattcagcccttcttcctcggtcaggatcaggcgtccatcttccgccagctccagcggctctgtcagcagaacggaacctgcatggtttgcaaccacttgttcttctacacagaccggctctccggggtcgtagtcagaaccgcgcaggtcatagcaataaacgccctccggcagattatcacggacaatccgcccattggagaacagaccggatttatcaaacagctcgatttcctgatattgctcgtcattggcaatctgaatctttttctgattgtggagcttgctgtgggcaatctcatgaaccgtggccgaaaccgtctgcacctcgctcatgccttggcgaatggcgattttctgatgatcggcagaaaaatagccgtccgtatcggcggccattgcttcaaaagtgatcggcaccggcgcactgcggcgcagagcctccatgaatgcctcataatttggcacattgccggaaagggaggaagcaagctccggcaaaggtttcccgtcggtctggcttacatcaaagaccttgaccggacgaaacatggggatttcgatttctttttcctctgtgacgatctttccgtctttatccagaatcggagccttggtatccgggtccagcttctgctcctcgattttcttcttatacggtgtgggggcgatgatggtaatgccatgctcgcccttttttacatgacgctcaaactggtctttccacttattgtatccggctaccaatgtagcgtccggcttctgcatatagatgagcatggtgttgtttaccgaatagcggtggaagcgggacatgacggacagatagcgcatatacttttcactctcaaacagttccttgatcccctgctcgatgccatctgtgatttcccttagccgctctcggttggtgggtttgttctcagccatgattttcaatctcctttccaagtgtgtgatttctgctgtgtgttctgcaacccatgccctttgttcttcttcactttcataaagaaaaaggtccaacaggtactctacataggttttcttctggattgcttccacaaagcgggggtgcggttcttcctccggtgtccggggagaatggtcaatcccccattttttcagcagatggtagtaatcggacagtacacgatagcaccgctgccggtcctcccgaaacttttgtgcctcggttttctgccggacatacctcctgcggggaggggcctgactgtcatagaccaggccaaagtcctgtgccagtttctccgccgcttcttttggggagaggtcaaagagctttgcggtaaagtcgatcacatccccatctgcaccgcagccaaagcagtggaaccgctggtctaccttcatgctggggttcttatcatcgtgaaagggacagcaggccataccatttcgtttgacctcgatcccataaaacgctgccgcatctctggtgctgaccgactgcttgactgcttcaaatacattctctgccatgtgcctttaactgctggactttctcacaggaggctggtatccggcagctttcgcacgctcactggcagctttgcggcgttctgcgctgtatggttccctgagtgatacacaccgcttggggacggtaaagttatgggcgtcctttcgggtgatctggtcggggtgcttttttgccagcagttccagcttctccatcagacggggatcgtgggtgtagacctcagccattggttctgcctggttatagaggagaatggtttcccgttccactaaagagagcttcatcggctgcctcctttccgctggtcaaattccagcttaaagttggcgtactgtccatcgtcctccaaaaccacagcggcatcgtaggtctttccggttttctccgaatataggcccgtcacacggacacggccatcgttaagcagtgcagacaccacagccttggtcggctgttttttcttggcagcccaccatttgttatttttccagattgcaaatttgcaagaatcattctgacagaagaagcctttttgcagttctgcaacttcaccgccgcagcgagggcatttgcccaccacctcacggggcggagtgaacaggtactcagttcccttgatgacctgataagttcctaccagatctttcagcatggtgctgatcccgtccaaaaactcctccggggcaagctgcccgcgctcgatctctcccagtcggtactcccactcggcagtcagaagcggcgattgcagttgttccggcagaacggtgatcagggaaactgcatcgtgggaagggagaagctgcaccgttttcctgctcttttttcgttccagaaaaccggcagataccagcttttccaaaataccggcacgggtggccggtgtccccagaccttttcgctcggcatcctccggcatatcctcttttccggcagtctccatcgcggacaacagggtgtcctccgtaaagtgctggggcggactgcttttgccttctttgacgattgccgcagaaaccgaaagggtctgtccttcagtcagctccggcagggctttctctgcaccctcttttttcggctctgcatccttcgttttggcacggtaagcgtcctccagtgctttccatccggggtgcttcaccgtttttcctttggcggtaaattccccaccggcacacgctgcaatcacaacggtttccgaatagatatggggctgggccacggcacacagcagacgcagggccaccagctccagcaccgctttttctcccgcaggaagggcagaaaggtctgcatccttgagatttctggtagggattactgcgtggtggtcggttactttcttatcgttgatgactgtctgcggatcacaggtaatggcgatccctttgcgaaacggcatagcattggcaaccagattcaccaacaccggcaggctgtctgccatatcaccggtcagatagcggctgtcagtacggggataggtgcagagcttcttttcatacaggctttgcagatagtccagggtctgctgggccgtaaatccaagcaggcggttggcatctctttgcagagtagtcaggtcataaagggcaggtggcttttcgagcttttccttacactccacctttttgattgtgacagctgcatcctggcaagcttctttcagctgctctgcgcttgctcggtcacttatgcgctccccagatatggtaagaccgggcagctccagcgccacggtataaaaaggaaccggcttaaaggtgtcgatttcagcttctcgctggacaatgagtgccagcgttggagacatcacgcgcccgatgttgagggtgcggtggtacagcacggaaaaaagccttgtggcattgatccccaccagccagtcggccttggcacggcagagagcagcatcccgaagtccatcataatctacacctgggcgcaggtttgcaaagccctcccttatggcggagtcctccatcgaagaaatccagagccttttcatcggcttttggcagcctgccagctcatagacgctgcgaaagatcagctcgccctcgcgtccggcatcacaggcatttactacctccgtcacatccggggcgttcatcagctttttgagaatatcaaactgctttttcttatcctttcccactaccatctgccaatgctccggcagaataggcaggtcatcatatcgccacttggcatacttgggatcataactgtctgcatccgcaagaccggccagatggcccacgcaccagctgacacgccagccgtttccctccagatagccgtccttacgagcagtcgcgccgatcacggcggccagactttgtgcaaccgatggtttttcagcgattacaagcttatatctcatcatcttcagcctcccattcttcccgcacaggcgtgtgcagttttttctctatgctgttttcctcatccagtagcaggttataaccaaaccggtagtcatagcggtacagtttccccagcaggtcattgatgatgatgcggcaagccaaaatgacacgggttttatccacctgcatcagttggtagcgttgataattgctgtaatattcttcgtgacggcgggtattgcaggcggcatcttcaagtaaactatctactgcatcctggcaaccatcttctttttccccttccatgcagttcagaagttccatcatcaaaggaaagctctgttcatccataggagcttctgctgcaagaaaaccgatcaaagcggataagagcagacgagccgccgtctgttcttgttccgtcagcacggccattgttttctccgtatttggcaggatcttttcttccacaaaatctgccgcatcgtcggaacaaagctgacggatagaatctatggacaatgaaactgtcatggtatctaaggagaaatcaaaggggtcatcttgctttggctttctccaaagtttgtttaacatggtagaaagaatgtcgccgccaaaatacacagcaattaccagcaggtcaaaaacagcaatcagcttgataaatataatcagaacactcatttttttcgtttcctttctttgagccagcgttccatctcacgatggcagatacctacgcagggacttccataactcccgcaaccatagcaggggtggttgtgggataaagaatgaggacgggaagtttccctcccgccctccggcctgcgtgtcatcatgcgttcatagggactgtctgtgaaacgggtcatttcacgctgtcctcgtcatcttcttctgtgctgccccatcagcgtccggttcgtccgactcctcatcctcggtttcccattcctcggaatcttcctcgccataatcataatcgtccagactgtcattgcccttggtcttaggtttattcttcatgagcttcatgtaggcaaatacgccaccgccgcccagcagagccagcagaagaatcagcgcagccggatttagtccggcaggcttctctttttccggctccggtgtttctgccggaggttccggtgctttgcccgtacatttactcttatcagttacacagacctgacagcccgtattgactgcccctgcttcacattttgccgtgcagctgcataccgcaggcggctcctcttttgcttttccatcttccatcagtgccatcaaatccgcttcatccacctgattcagaaagtgaacagcagtctttttatcctcattcgccctgtcaatcaggatgtaaaagtaatttccagctttggtcgtaacagtaataagctgcttattgcctccaaaatcatccaccagtgccgcattcccctccggtgtaagtgccggtgctggttctgtttcttccacagtaacattgctgtcattggtagaatcctctgccggtgccgccggagcctgttctgacccctgtgcaaaagcagggatcgtaaagccaaatgccacaaccattgtcaggcaaagggcggaaagtgttcggagcaatcgtttattcctcatagctgttttcctcctgttcgttattgtcatcagccaaactgccgggaactgtgccaccggacagcatggcgctcaactgggtcggggtcatacgcagggcgcgcaccatctggacgatctccagattttctgcctcggttttctgtgcttccagcgccttgagcttttcctgatactctgcgatcttctcgcggacctttgtaatctcctggtcaatgcgctcaattttgttctttgccatcgtctatcactccttcttaaaaatctctgttaccagttcatcaggccgtagcccttaatgctttgataattcaggtcataacttttgatcttgcaggcatcgccggaatttccctccacggtataaacacggctgccatccgtaccgatcacgatacctacatggtctgctgtcccatccaaatcccagtcaaagaaaattgcatctccgggagccagattgttatagcctcttgcaccccattgtccatgggactggaaccacggaacgccctgccactcacagcctgcaaagcgcggttcactttttcctgcctggttatagcaccaggatacgaagcaggcgcaccattccacacgggagtcaaagccgtaccagctccagtagggataaccgcccacattgcccacctgacgcttggccagttccaccagctgaggattgccggggcgggtaccgttaatgaactgcacaccggacagatcttccgagccgctggtatcaggggagccgccgccaaacaacagcggcttattgcccatggtctgccggtaaacctgatacattttcatctgctccggggtcagaagctccgacaccacagcggaaatgggcttgctggcgagtttcacattcaaaatgtaatactcatagggaacttcttctgaggtggtctcgccggtctccggatcggttgaggtctccgtgcggtagcgaatctccacttcctcagtaagcgtcagctgatactgtgctgcaaacacacgcgccagctcagcctgagcgctctgccgggtgtagccttgcaagacggcagagagaaatgccgccagctcatgagggtcatggccgatcataccaaggtcatagcgatactcgtcataccctgggtgactgctttcaatgttgtcgatttcctcctgcaactgggcttctctggctgcataatctgcctccaccgccagcatttccgagtcatccgacggataggtggtgccggagagaacggaaccgatgctctgcgccatcatggagcaggaggacatggtattcatcagcatacaggtaatgaggaacaaaacccctgccatcaggaaacccttcttgtggcgcatgacgaatgcccctgcctgctgtaccttttcttttaccgtccttgcggcttttcctgttttggatgcagcctgggcggtatttccagcagtctgaccggcatgtttggcggcggcatactgctttttgatggcctgcttttgctgccagcgggaaagtggattgctggcaaactggggattttcctgcaaagatttctggtacagaacatttacatttgccttttccagttggcgctctgcctgtgctgctttgcggtacggcttcagcttgtggctgcgatagccctcccgcaccagataagcgccggtctccaccgcttcctcggacttgtgggcgctttccacgcccacattgtcctgttctgtttcccggatctctttgtggagcttgcccgcaaccagatggacgggagcttccttgaccccttgagaaagtttggagggtggctttttcttgtcctcaaaggtcagcttcgaggtctttttcccggtatccgggtcgatgaccgtctgcctgacctttttctttgggatattggcctgcgccttatctgctctggccgcagctttctccgctttacggatcggcttttccagtgcagggtcagaccgttcctcatcagtaaagcgcaggcgcggctccttattcaaaccattctcccagcatgagggaggacatcatgtagtgcagctctgcataaatggccattcccacaggatcgttgaacatacaaccggacaggtaggcgtaaaactgtgccaccacatcggacaggattttcgcttcggttccttccagaaccagaccacccataccttccttggcacggatggtgctccagacctctgccagacggagcagccccacctgaccggtctcattcagttcggctgcctgatctgccgccgtgcggcactcacttaccgcatcggccatgaccgtaagcagctggctgcgctgggcatttaccgccctgtcaaaaaacatcaacgggttttgattcaaaatgttggggttcatcatcattcatcctcctttttcagttcctggggtttggtggtcataatgcggtacagctcggtattcttcgggaagtggtccacgaaaggcagaattgtggagccatagaacagcaggccctcgccctcaccggagtgggtcacatagctaagctggtgtgtggaaatgcccagctgcttggcaagtatctggcggtctccgcctgcctggttgagcatatacacgaagtcggagttttcaaagatgttctctacctcgcggctgctcaaaaggtctttgacattctgggtaatacctgtcggaataccgccccatttacggaatcgcttccagatttccaccgtataggcagcggtctgttcctccttcaaaagcaagtgcatctcgtcgatgtagtaacgggtagacttgtgggcagcgcggttaatggtaacgcggttccacacctgatcctgtaccaccagcataccgatttttttaagctgcttgcccagttccttgatgtcatagcagacaatgcggttgttgatgtccacattgctctggtggttgaacacattgagggagccggttacatagatttcaagggccgtagcgatatactgagcttccttttcctcctgttcccgaagcaggttatacagatcctccagtatgggcatattctccgggcgcgggtcattgaggtaagtctgatagaccagacgcacacagcggtcgatgatggttttctgcaccggctgcaagccctccttaccgcccacgatcagctcacacaagctgagaataaagtcagacttgagggacagcgggctttcatcatccgagtagtccaggttcaggtccatcggattgatgtagttggtggaggtaggcgagatcttgatgacctgcccatgcagacgctccaccagaggtgcatactccgcttccgggtcacaaatgataacatcatcactggtaagcaaaaagcagtttgcgatttctcgttttgcgctgaaggacttaccggaacccggcgtacccaaaatcaagccgttggggtttttcagcagctttcgatccaccatgatgagattgttggacagggcgttgatgccgtagtacagagcttctttgccgttctggaataattcctgtgtggtgaacggtacaaagatggccgtagaactggtggtcagtcctcgctggatctcgatctgattgagtcccaggggcagacagctcatcagcccttcttcttgctggaagtccagcctggtcagctgacagttatacttctgggcaatggagcctgcctggaaaatgttgttgccaagctgacggggattgtccgctgtgttcagcaccagaaaggtcaaaaggaacattctctcgttgcggctctgcaaatcctgcaagagttttttcgcttcactgccgtatgtggcaaggtcagagggaatgatgtccatgtcatatccggcgcggactgcttttttctgttcctcaatcttactgcggtcaaggtcggtaatcttgcgctttaccgttttgatggctttcacctgatccaccgactgaatgtgcatactcacaatgagcgagctttccatatccagaaaatcagccagcagacggtcattcagctccggtgcgagaatctgcaaaaaagaaacagccccgtatttcttgcccatacggaactgcttgccggtgcggaactcaaaggaacttggtgcaataaaatcctttgtggacagaccggaaggagccagccagtcccattcaaactgaaacgggagctgttcatccatgtggaataccgcatgaagctgagaaagcctttctttaccgtccagcgttctggcagctacaccaagacgcttgaagttgttgagtatatcggtctcaatacgctccagacggggcttggcggctttgatgctgtctgcgtcgataccaaaggtcaggtatttggtcttgatgagaccgttgttacctcttgccagctgattttgcagcattgtggtgtattcctcgcggatactgtcaaaggcatccctttggggcgggatggaaatggagttagcaaaggtctcctccgatgccgcaaggttcaaaaaagacagttggaaatgaatcgagctgtcaaaataattgaggaaatcacaccaaccctcaaagattgccgtcttatcttcgttttgggagagttgatagttgatgtcctgaaactgaatgatctttgtgtagtggctgtccgatatgcggcagatcccgtccggccacatccgttcataagggatactgtcctgcgcagattttccttttttgtccgtgcggttggcgcggacaatggccgcttcgatctgcttcttatcggcgcgggacagctttttctttgtctttaccggctgcacagttttttcctcggttttcccgaacatccgatgcagccatttttttattgcggtgaacaatgtcatacacctccttatcgagcatttcctgccgctttaatacggcataaaagttattggtctggtagggacgctgcttgggacggatcacagctactttgagaatgttgcccacgatcttttcaaggggctgtccatgcttttcgtacatagccagcataaagaagggcagcataaccagcatcatacacatagccgctacactgtttccggtaggttttctgagcaaaaagaaaagcggtacgccaataagcgctccgcccgtgaaacagataagctgccgcttggtcagattgaacatgacctttgttttgacttttgttaagtccttgggtacgggtacataagccaatgtggaaacctccttccgttttagtgcgcctgaaagactgatttggcgagactgccggttttgaacagcgtaaaacatagcagtacggtgtagcccacgcagctccagattgccatgatgatgtcatcttccagagcgatgttctgcaccagcacagcataaattgccacgcagacgataatgagaaacgcctgaaagcccagcgccagcagggatcggaggtaattctgtcccataccgccccattctttacccatcattgcagccattggaacgggagccaccgaagtcacaaggtaaatctcgatcatacggccataaataacgataaagatacagatatataacgcccacatagtaatgccaataaagagggattggaaccacagtccgaacagcggtcccagatccatttccatcagcctcggttccagatcggtcataactgaggaaatgtcaatggacgcatccgaattgataacccctgccgcctgcgccaccacgctctgcgccatatcaaagacgcccatcacgatattccatgtgtttgtgacaatgaggatggcagcggctgatttgaacacccacttgaaaatcatccaggtatccacatcatgcaggttgttcttgtctgcaatcatctggatcaggtctacggtcatcacgatagccaggatcacgcctgcaatcggcaccatgatggagttggacagattctcaatcatgctgaaaatactgccattccatccctgtggggtctggcctacctgtacggatatatccgcgacctgctggtttacactgtcaaacatccccgaaaggttgctcataatgccgcccaccagcatttctttcagccaatttgtcagggcttcaagtaagaaatccatacggtgtcaacctcctttccgccgcccccgcaaaactgcgggagcggcaaggatttcatacggagacgcttagacagagaaaagcccggagagcagaggtacaaggaccatgccgactacggctacaccagcaccggccatgagctgcttcatgccctggctcttggcgccggatagcgataggtaatcctttgaagttatctccagattttcccccgctccacaccgtgcatgcgactttcaccgcacacggcgctccatcgaattcagccgtccagggttttaaacacaacttacacacttcgttacagcattaaattcaaagaataataggtggcatttctgccatagtacgaagtttgttaagcttttctatttgtttatcgtcaagatttaaggatttcaagtacttctcaatcgtaggttctgaagaagcatggataaggatatgaactgcttcgctgacaagaataagatttgcgtattcatccgaaccaccattgcttacgggcactttatggtggcagtgaatatcatgagaatccatcagaattcccgtcactgcacatttaccatactgtgccgcatacaaggaaatacggttatccgcatattcaatggttctgccctttacaggatttctcatcagccataacattgtcgctgtatcgattgcaagattcttatgaatctgttcccgacctttgaccgtatacttattgatggatttccttttatgctgggcattcttcggctggacatatcccagtggaatcaccggacgtccatgaaggaacctcatctgtctgcttgctccatacttttctttaataaacccatttctgagctgtccctttttggataagtcacctttcagtctgtttctgagctgtttgttgatactgaaggcaagtctgctgaaatcatgggatacttctgtagaaatacaatagtattcatgaagtccggcaactacagcgttatatttctgaagctgcatgaactgagcattatcatctgacgaatgagccagtttctttacttcttccgagacttttccatgagcctttttgtatgctttatcgctcatatgagaccgaactacatacttcttaccctttttacggactttcagcttgaacccgagaaaatcagaatactgtcttttgagattaactactttggatttgtcagggctgatttccaaccccagcctgtcctttagccataactctgttgccttgtatgctttgacagcatcctcatgtgatgcgcagaaaattttaaaatcatctgcgtaccgaactgcatgcatctcttttaatctgctccggcgcagagctctgtaagcgtggctcttaatctctgttccctgcgcattgttcctcgttttgaattttgtccttgttggcatctgctcccattgagaagcaatccaccaatccagctcattcaatacgatatttgcaagcaatggcgataaaataccgccttgcggagtaccccgtgagggatatgttttctccccatttggcagaacaacaggtgctttcagcatctcttttataatgcataacagctttttatcccggattcccaatgcccatatctgacgaatcagctttgtatggctgatattgtcaaagaatcctttaatatcgaggtcaaccacatggtacagatgctgtacctgtatcagccgcatgcattgcgcaatagcagtctcagcagaacgattcggacggaacccgttggagttctcactgaattttgcttcacatattggctccatgacctgcaaaatacattgctgtacgatccgatccacgataattggaattcccaggggtctggtctttccattgggctttggtatctccactcgccttacgggtcgtggatgataattactgaattgtttccgtatgagacggacgtaagcttcctcgcttaactttgcaaggtcggctatcgtccttttatccactcccgaagtatcacttcctgtattcttctttatcgttctgtatgcaagtttgatattttcttcactctcgatgatttccatcagatggttgaaggttttatttctcttactttctgcatacagcctgtcaaaagtgccttccatgtcgtaatactctgagttgcggattttcctctgcttacttttcctttcttgctgccccgaagtcaacacaggcatcctctcccttcggtttggattttctttgtcatactcgaagctgtgtttgttgtgttttcattttcattgctgaattcgacttgtggctatccctccaccgcttacttattcacggcttcacaggtactgtgccactactctcactggaataaagaatggttattgccctctcacgaaggtattcccatccaccacatcattggcttgcaaccgcctccgtgttcccagctttccacgttccgatattcctatcattgaatatctttaggttcttcctctaagcctgtatctggtcatgcataaccgcaccgcctgtaacggtgcatggactttcataacaaccaattttactcgcccacagataccaccataaaaggtgtactgcctttcgacagcatcaacgtttagactcgtacattcggaatttcgtcagtattttcatacattctcaccatggatatccgacccccggcatataggcaacaccatccacctctggacagctttcgtgtctggtctgaaaaccagtcttacggttgctctctgccgacttcaccgagctctataaacttttggagagagccgttgcatgctccccgccattcggagtattagggtggcgcttcgggacgttaccccctcatttcacccatcggaatatcagttctccaaagttttgggctacaattgcccttcgactttgtgcgcaagcttttcacttacgaacgtgtcgcacggttgtcgttgccgtaaccttccagcaggttgataacgccccagataccgagaccggcaccgagcgcgataacgagggtctgaagaacggtgattgcctgttcaaaaaatgccatatagtttgttagccggaatctgattaaaaaataggtttgtcatgtttcataggcatacaaaagccggaacaatctgccgcccggtttccgggggcatgattccggctgtcctcctttttcattattttttctcgcgattgtccgctttgtacgccaatggcccatagagggcaggtgcggcgaatagataagatcactcccttctaaagcggaacgaaattaagcgccctttgtgtctacttcatatacatcgcagacctcattgggcttgagtttcagccttgcagacaagaatgcttcaatgtcaaaagcgttcttatcatccgcgtcggcagtgtacttgaaattggggtgcttggtgatgtcgtacttatccgaaaggaaaggacgcacaccgcgcagctggaggatacacttgcctccatccataacagcaagctcatcctgactcatcagctctttccccaatttttgatagttgagtgaatgggaggtttccctcccacggctctctccggtgttgtaggtgtcgatggtttccttgcccagcacggcagccagctctttgagggtagtcggctctttaccgcccaggaagatggatgtatccatgttaccgatgatggtatctgcgttatccttatagatcgccttgagctgactctgtgcctgcaacaccagacaggcagagatttcacggcttcggatggtggccaccagcttttccagtttcggaatctgcccgatgttagcacactcatcaatcaaacagcgcacatgaaccggaagcctgccgccatacacatcgtcggctttttcgcagagcagattgaaaagctgggtataacacatggagatcaggaagttaaagctgtcatccgtatcactcataatgaggaacagagcagttttcctgtctcccagagtatccagctccagctcatcataagccgtgacctcacgcaactctgcaatgtcgaacacggcaaggcgagcgccgcaggaaatcaaaatcgacttggctgtttttccagcggccagcttatatttcttatactggcgcaccgcaaagtggtttggcttctcggcttccagtgcatcaaacatcaggtctacggggtttttgaactcctcgtcatcctcacggacttccatagcgttgatgaactcaatgagggtggagaagttttgttcctccaccggagcctcataatggatatagccaataagcgcgcagtacaacaaggtttctgcttttacccagaaatcgtctccggccttgccttcgcctttggtattggcgatgagcgttgttaccagcttcaagatgtccttttcgctatggatataggcgaaagggttatagtgcatggacttcttgaagttgatggtatttaggaccttgattcggtacggctcataaatgaccttgccgtgcttatccttcataggctttccgtctttccccagcttgggtgcgcccctttggagcatttttccgcactccaccaaaatggttcccttcgggtctgtgaccacataggaactgtgcatctgcatcagattcggtttgagccagaagcgggtcttaccggaaccggagccgccaatcaccagcacatttttgtttctggcggtctttgggtccttggggcggctgttcattgtcaggctctccgttttcgtcagaatcacattgttctggaataccgggtcgatgtagggtgcaatgtcctcatgggttccccaacgggcggaaccgtattccatgccgtgcctgtacttcttggcgttcttgcttttcaggtacacagccagccgcaggccgccgccgcagcacaggcccaccagcaggtccagcgggtgcaggctgggccaccagctggccagcgccaccggcagcgtggagaagaacgagagcatttttgccgaagcgtccgcacccacggccatccgccacgcttcaccgaagttggtggagaaaagccccatcaggatatacggcagattcagcaaaatgagctttttgatgttcagctgctttttcatcgttccagctccttccgcttgttccggtccacgacggcgtgttttaccagttctttgaactggctcagctttgccagcacggacgggcgctcggatttctccgccttcttgacctttttcccggtgtactcggtaaaagcagcggtcagggcatccgcgtcccgtcccttgaaaaagatcaggtacttgggtggggagctgctgcggtccttcttcaccgcatagtccacgccgtatttccgcgcgatcttctcaaactccttgatggaggggtcagtgatctcgatgttggaaacgccctgattctggccgatcagctgtttcaccgtctgcttgccgtggggaatcacgggggtatcccggcttttctgcttttgcagcttcttttccttgcggtgggcaaggtatttggtgatggcggctttcatcaaccgcccggtaaactttgttccgctgactaccagcgtcaaagtcctgttttccacttcctcctgcataggtcatcgcctcctttccacggattttgcaggggtggcacttgatactaaggcgggaccaccagccgccgcagaagataacgcttcataccgccctccttagcgtaactggtcagtacggtcatagtgcagattgccctgacgcacctttgcgtggctcaaaatcttaatctgccccttttcctgactatccagtgctttttcataaccggtatccgacaggaacaggcgggttcgttcgcctttccagccaacaggggaatcgttcgtcagcacatcaaaaataatcatgtgccgggtgtcctcggcaaaccgttgcaaatccatgtattcgtggccgtggtagttctgcgccccggctttgaggcgcatttcctccatcagctggcccacggtcttacgctcaggcatggcgtgcgcctcctttcccgcgtccctggcccttcacggccaggataccgtccagggtggtggcggtgatccgcaggcgctcggcggtggcaatgtcattcttcacggtctcgtcgatgccgtggccgcagaccaccagcacatgggaccggcgcaggtagtcccgcgccatatccagcccgtccttgtgttcctggggaatctcgtctttgaggaaggtaggcaggaacagcaccgggcagatgggcgaatacccggcatcgtacacctgacggcagtaggccgcagcgttctcggcgttctcatactggctgttgctccagggagccgtaatgtaggcaagaggtcgtttcatggcaaaatcctttctcccggtgttttcgggcagcagaaaagcggctgtttaccagccgcctgcgtacatatcgtggttaacttgtgcggtgtagtggttgctgatcgtggtcggcgcattaaacagcaccgcaagcagatactgcttcatgttgcggatttcggtggtattgttccgcaggcattccatgacaaactcgatgtgggagcaatccagcttcaaaaaacgggagcggaccacctcatgggggaagtcgctgccagcgatccgggtggttttccgcttggcgcagacggtctccaccatcagctccacaatctcgtccaggtcctcccgataggtggtaaactcccggcacaggtggtcatactcgatgttctccagaatcaaatcccgataactttccatctctgagacagacatcgcatcccttcctttccgttccggcagctgtgctgccgctggctcccggaagggaatagaatcggtacttgatccataagtaattgttttttctgtatttgatttctctatatttaattctgcgggcttttccgtatccggttttaccatatccgggttttccgtatctggtgaagccgtatccggctggggcgtatccgggttcttcggctgtggttgctcgtagataacatactcggtatcgctgatccgaccctgccggtctcgcagctgatggcggacaatgtacccggcagtttccagctcccgcagcgcgccgccgatagcgtccacgccctctttgcagatggcggcaagccctctggtggtatagttccagtcctccggtaaggacagcatcatggaaagcagccccttggctttcagggacagtttcccgttgcgtaaatggtgattgctcatcacggtataatctctggttcgttcaatgcgaaatacggccattgacctcactccttccaaatttctcagggtatgaaaaaagccacaatcctgtaaaaagaattgtggcagtcagctgttttgttcactttttctgcgccggtaggggcgcttgggaatgggcggtctgtccaacaggtcatttccctgagagaatggcagagtttgcagaacacggtcaatctctataaattccataccatgctgggaatggcaatcctcccggattgcttcccggatttcctttacagtacacatttcaatcctttcctttcgcagtaatgatttgtttatgagtggcggcggtgttttcccggtttgaaatcgaggatatgtccctcaatcacacgagcgtaacgcttgatcttgatctcccgacgctgctggctttgcagggcggcctgatacccgtcctcagtcaaaaacagtcgtatttcctctccggggctaccgtaagctgtgctgggacgcaggacggaaaactcaatcatccagcgggtgttatcccaaaacctctctacggcaagaatgttatgtcctttcagctcacgggctgaaatatccctcataggcggctcctttcatcgttcctggtctctctgacgctttttctgccatgcctccagcagcttgatgatagtgtcctgcatccgctggggcgtatagcttttagggaaatacttccgcaaggtgtcagaggtaaatgtcactcggtccagatcgcttttcttttcctcacccatgatgacacgcatcatatcgagggtcagatgcccctcctgactgtatttcttgagccgctgggcttgagaaagagaaggggtagcctgttcgctgtccattgcatccagcaaatctctctgttcctcttttttgaggaaggacagctcataagcaggatttaaggcaattttcttttcatccaccatgtccagcagttcgggaatcagctcggtcagacggataaatcttttaatctgtgatttgctatctggactgttctccgcgattttttctgccgcagtcaacttcggcccaacttgggccgaggttaaatccgtcctggctccttggtgcttaatggcatccagtttcatcttataggcaaaggccctttcactgggaagcaggctttctcgttgcagattgctgtcaaccataatgatcgtggcggcatcatcatccaaatcccgaacaatgaccggtatggtctccttgtctgccagctcactggctctgtgccgcctgtgtccggctaccagctcataaccgccctccgggtccggtcgagcaatcgccggaaccagaacgccatactgcttgatactgtcagcggtctccatcatggcttcgtcatccttgactttgaatgggtggttcttaaagggatgcagttcagacagcggaatctcctgaatcttttccagctttgcatcctgacggacttcttcggtggagaacagatcatctaccgaggccagctctatttttttcgcgctgcttttcaagtttcaacacctccttcatcagatttcgatacccctctgccaccttgccaccgggatcatgggcaaaaatactttttccctcagcgctaatttccttagcccggacagagtggggaatctctgtgccgaatactttgatcttgctgccataggtctcacgcaggagcgcggagatctctttggcaaagttggttcggctatccaccatcgtcagcaggataccgtctatctggagcttggggttgatctgccgctttaccttgtttaccgtggagagcagctgttccagccctttggcgggcagatactccgcctgaacgggaatgatgatcctgttcgcagcggccagcgcattgactgtgagcatacccagggagggctggcagtcgatgaggatatgggagtattgccccttcagcgtgtccagatattgccgcaagatagtctcgcgactcatggcgtttaccagggatacctccataccggataactggatgtccgcaggcatcaggtctacaccctctgggtggtgcaggataccctcgccgggacgaagcggctcatccatcaggatacgccccatagcgtccgacagcgtaaagggcagcttgtccggctggggatggcccaggctgattgtcaggctcccttgcgggtccccgtcgatcagcaggactttctttccggcctgcgccagcccgattcccaagttggcacaggtcgttgtcttaccaacgccgcctttctggttggcaatggcaatgatttgcgtgttcattaacttcacctcatttctaattgttgctgttgcttctggaaatagaaaaagccgccactccaaaataaaaagtgaagtgacggctctttctatcgccggaatacgagttcctgaaatgaaaaaagcacccagtcatttatgtgatctgtgtgctacatcaaattcatattcaattattcaaattagctcaaactatgccaaactgccacagccaaaaaaacgaggggaaggagggctgaaaagcgcccccaaaacacccccaaaatcggctctcggttaaccactttgggaaccacttgaccctctttttaccccctttttggccggttaaccacttgcggaccactaaaaattgggtgaaaacggctctcgttttgtcaaatttggtcaaaccatatcagcccatttaggtataagaaaaccccggaaaaccttgattttccggggtttttgaaccattttgatatagtctgagcagtcgattatcgcttgctgaactgcggagcgcgacgagctgctttgagaccgtatttcttacgctccttcatacgaggatcgcgggtcaggaaaccggccttcttcaggatgggacggttgtcctcgctggccagcagcagggcgcgggcgataccgtgccgcagggcgccggcctggccggacacgccgccgccggtgacagtggccacaacatccatcttgccggtgttgccggtggcctccagaggctgacggaccagcatcttcagggtgtccagaccgaaatactcatcaatgctccggccgttgacggtgatggagccggtgccgttggggaacagatggacgcgggccacagaggacttccggcgaccagtgccatacagatagggcttcttggactgatacatacttcaaactcctccttattccgcgtccagagcgacgggcttctgagcctgctgctcgtagttggcgtccgcatagatgtgcagccgcttcagggattccttgccgatggtgttcttgggcagcataccgcggacagccaccttcatggccagctcgggctgctcctgcatcaggatgcggtagggggtctccttcaggccgccgatccagccggagtgggtacggtacatcttctgggtgcccttcttgccggtcagcacagccttgccggcgttgatgatgatgacatagtcaccgcagtcggcgttgggggtgaaagtgggcttggtcttgccgcgcagcaggtcggcagcccggacagcggtcttgcccaggggcttgcccgcggcgtccaggatgtaccacttacgctcaatgttggccttgtttgccataaaagtggacatggtgtttcctccgtatattgaaattctttgctttgctttacaaatcaagagctccgggttacaatcggagcaaggatatttataccacggcggcgggggaatgtcaacggggatttcgtttaaccgggataaatctctgaatttctcttgatacctcttattatctcctgatttctcacgttctattttgaatttttcgggggaaggccctgtacgccgaaacgcctgggggcgctggatcttctgcgcggccggccttatgcggattctctgcgccgctgctatggcagaagccctggggagatcgctcgctatctctgctgggagatggcggaccggggcaccggccccatctgactgccggcggtgggggacgatgggccggaccgcttcgccatgtttttgggcgagagaaaaccggacgagcgttacatcgtccggttcccgcagaatgtcgatggggactatgaagcgtatgggcatccggtgtggatgtacggcccgtacccggtgcggggcgtctacacccagcccatgagggctattccggccacggaagcctgttacgtcatcgggaatgaatcggaaaaactgacggaggtccggctgcgggtggacgcaggcctggacgaatccgtctccatccccgccccgccgtccctgaccatctggcggtttacaggcggggacatgggctggcgcctggtggaccggtattttgacgcccggggcgaagaactgccctgacgtttgaaaacaatatgtaatgctacaagatccactggaccaacagcagcagcacaaatcccggcaggcccaggacggcgatcaccagggcattccacaggttcagccccagggcgatgccggtgaggcccgccgtcagccgtacggcccccagggctagaaaccccaacagggtgttcagcagtagtttcagcgccaggcggaagggggagctgaacacccggatcagagcgacgagaaagaagcccgccaggatggcggcgatgatcttctgactcaggtccatgtggacgccccctccagcccggcagcagccgctgcctcgggactccgctccttgatggcgcggatcagatagttgcaccgggccttcacggcactgatctggtagacgcaggactccaccagctccgggtccagggcctggtcgaactggcgataggcctgggccaggtccccctgggcctccagcagctcggccttcagggtcagcagctccgggtcggggcgggcggctttcttggcaaaaacaggtttcatggcagtgtccctcctatccatattcttacggggagtttggacaaatatgccagctttcatacaaggaggcaggaagaacatgccaacagaacaggagaacttcatggcccaggctctggcgctggcggcggaggccgcggcggcgggggaggtgcccgtgggctgcgttatcgtccgggacggggaaatcgtgggccggggccgcaaccggcgggaggagaagcaggccaccgcctcccatgcggagatggaggccattgcccaggccaacgagcacctcggcacctggcggctggatgactgcgaactgtacgtgacgctggagccctgccccatgtgcgctggggctatcctgaatgcccgtatccgccgggtttggtacggcgcccgggacgaggccttcggtgcctgcggcggagtgaccaacctgtttatggagagcttccccaaccggcccgccctggtgggcggcattctgggagaggactgccgccgggtgctggcggatttttttgccgggctccggggcggagaaaaaaatcgaccctcagatttgatttaagacttttgtaacaattgatgctggtttgcttaacaactctctagtatcttaatacttgcaagagacaaaacttcttttcatccaatcttccaaaaaatagggaaacggaccagccgaaaggctggtccgtttctcgatttccccggtatttgtgaacaaacggaaaatccccgcggcgggcactcccggccgcggggattttgtgataaactgtcaggtattgtcccagggcgcggccagtaccgccgtccgctggagcaggaagccgaaaagcgtcacggcgccgcccaggtagaacagcagccgggccggatccggccggtccgccagagtggccaggcagaaggcgatggccagcgccgcatagacggcgaagcggcgggtccgccccgcccggaaggcgaaggaggacagccggtagaaggccagagccaggaacaccaccgccagcagctccgtgtagtaatctgtgagggacgggtctacggacaccacccggtaggtcagcaccagccgcaccaccaggcagcagacgggcaccagcagcagaggactctgaaagggcttgcgcgccccgccctccggccggatgcggcaggcaggcacagcgggaagcaggctggccgccgagagaagagacagcagacccaccaccagatgctccctgccggagaagagctgactgccctgggcggtcacaaaaacggtcaccgtctctccgctgccggtgagggcgctggcgccggagaagccgaagagcaggtccagaacgccggaggctgccagcaggaagagccccatcaccgccggagtgagcagcccgggggaagccacggagaagcctgcgggaaagaggggcgggtcttcccggtccgcaggcagaaggggccgggctgccagcaggcagactgccgccagaaccacgaaccaggccaccagcaggatggcgtacagattgccggggatggggaggcctgtgtccacctcgaacccagtgctgcgctgaagcagccgcagcaggaatgcccccacgccgccaatggcggccagcaggggccagagcacgtatttcttcataggagccgatctccttatcatgacagattttcaaaagccagtataccacgggaaaagctgtttgtccatgccggcctcattttccgccctccgggcgcatacagtgaagggacaggcccgcagacggggaacaaaagaggaggaatttccatgagacgccattctgatctgcaccagagcgccgccatctccgcggtgctgctggtgctgctgtttgccctgcccctggcggtggtagtgccctttcagacagagcttttctccgatgatcccatcgctgtggagtcggagcgggagccctttcagccgggggacctggacggagagatggtgctgaaggtcctggcaggggacgcggtggaggagatgaccctgggagagtatctggtgggcgtggtccgggcggagatgcccgcctcctttgagccggaggctttgaaggcccaggcggtggcggcccggacgtacaccctgtacaagatgcagactggcggcaaccacggcaacaccgcggacatctgcacggactccacctgctgccaggcgtatatctcggaggaaaacgcccggaacaactggggcgagaacgcggacgcctatgaggaaaagatcgagaccgccgtccgggagaccgacggagagaccatcctgtacggcggcgtgcccatcctggcggtgttccactcctgctccgccgggcagacccgctcctccggccaggtgtgggtcagcgacctgccctatctccaggcggtgtcttcgccggagcctgcggacagcatccccaactattacagccgtgtggaattcacggcggaggagttccgggagaaggtcctgacctcctatccggaggcggacctgtccggcgacatcagcggctggctgcaaaacgccgtgacggacaccgccggcagcgtggagtcggtggacgtgggcggcgtgagcatgaagggcagcactttacggagcatcctggggctgcggtcggcctgcttcgagtgggaggcggcggacggcaagctggtgttcttcgtcactggctacggccacggcgtgggtatgagccagtacggcgccaaccagatggccaaggagggagcggactaccggacgatcctcacccactattataccggcgtcaccgtggagccctatactactgccgccatagggtgactctttacaaaaaagccggaaatgtggtaaaatacaatcttccaggggagcttctgcggaagggaggacatgatgagacgaaagctcgcggcactgctgctgtgcctgctgctggtgttccagctgtcgccggtcccgtcgggggcggcggagacggtgtatttcaccgcagtcaacaaaaacgtgctgacgctgtcggacgacaccatgcccttctggtccggcggctatctgtatgtgcccagcactatcttcaccggcgtgggccgggatctgggcgtgtcctactaccccaatattgcccggcagaccgtgttgctgtatgtggacaagacggtatacagctccctggtatttgacctgaacaaggactatgccatcgacaacgagggcaacctgtatttccagaagcccatccagcggggtggcgtgatcttcctgcccatctctctgatcgcccggtgcttcggcctgctctactccaccgtggaggtggaccggggctatctggtttgggtgcgcaatccggatatggatatggaggagcggtactttgccgacgccgccaagtcccggatggactacgagtacaaccagtacctgcggaaccagagtgcggaagaggacatcgcgccggaggaaacggagccctccaccgtcaccgggcagcggatttatctttgtgtggaggccgcggacccgaagcgggtgaagtccctgctggacattctggaccgctatgacgcccacgcggctttctactgtacggaggcgtttctgcgggaaggcggcgacctgctgcggcgaatgaccgccacagggcaggccatcgggctggcggtggacgccgcggcggaccgcccggtgacggaacagctggagacggggaaccgcctgctctcccaggccgccagcgtcaagacccggctggcttggattgaaaacgccggggaggagtctgtctccgcggcggaggcggcgggcttctgcccgctggacccggatctggaccgggcggcgtatcccctcagcagcaccggcgccgccgacacgctgctccagcgggtgaccagccggggcggcgaggtcactgtctggctgggcgacagcgccaacgccgcagggcttgggacgttcctgtctgcggcggaggcggcggacgaccgctgtctggccatgacggagacggtgtcctgacctgccaagatttacaaaatattcaacataccgccccgggagcggatataatagaggatatcaagaatcggctgtgtctgtgaacaggcggacgccgcgggcggcagaaccagcgaagagagacatatcgaaatgggagggagcgccatgggccgcaacatcctggtcgtggaagacgaccgcaatatctgtgatttgatccacatgtacctggtgaaggaggggttcgacgtccgcatcgccggagacggcggcaaggccattgaggagtttcagaagcaggttccggacctgatcctgctggacatcatgctgccggtgatggacggctggtcggtgtgcgccaaaatccgggagaccagcaaggtgcccatcatcatgctgacggccaagggcgaggtgttcgaccgcatccagggcctggagatgggggcggacgactatgtggtgaagccctttgagatgaaggagctcatcgctcggatcaatgcagtcctgcggcggacggagatccccaacgacaccagcaaacggctgacgttcgacaagctggtgattgacctggactcctacgagctgatcgtggatgggaagaaaatcgacacgccccccaaggagctggagctgctgtatcatttggcctccacccccaaccgggtgtacacccggaaccagctgctggatgaggtgtggggctttgactacttcggcgacagccggacagtggatgtccacatcaagcggctgcgggagaagatcgaaaacgtcagcagccagtgggcgctgaaaacggtgtggggcgtggggtacaagttcgagctggcaggcgcccccggggcaaaggagagctgacgtttccggggacgaaggccccggcgccgcgaaagcggcgtcaagcggtccgcaggacccttgaacctgccggaattcatttccggcaggttggtgagatgaaaggggcccccggaggcctgcggcctccggggaaaacagcagccagtgggcgctgaaaacggtgtggggcgtggggtacaagttcgagctggcaggcgcccccggggcaaaggagagctgacaaaaccgcctgaaaagacctttgccttttcaggtggaaaaccgggcagggaggtctcatgaaggtacggatcgcgcgtattgcaaaacggatgcacaacaagttcaggggcctgtactggcggcagatgttcgtcaccgtcggcatggtgctcctgacgctgtttttgctgggagtttcgtttttctccctgagctacaactacgcccggggccaggagaacggggagctggccgcccaggcccaggtggtggggcagctctccgccagctatctggaaaacgggcggtacctggacatggaggagctgcagcacgaggaggacttccagcgtctggcctccttcgctgccacggtgtccgaggtggacttcctgatctgcgacgtggagggccacgtgctgctgtccacggatgcgtctctcagcgggctggtggtgactatgccggaggagatgaccgcagaggtgctggaggagggcatcagctccaggcgcacggacgtggacggcctgtactccaacaagcggttcgtggtgggcgttccggccataagcgaggatacccccgaccccgtcggcatggtctatgccgtgtcctccaccacctcgctggacaccatgtggtccggcttcatcgggctgttcttcatgacggcgttcgtggtgctgatgatctccttcatggcgtcctccatcaccaccatgcggcagatccagcccatccgggagatggccaaggccacccgccgctatgcggagggggacttcgacatccgcatgaacgactacggccgggatgacgagttgggagagctggcggcctccttcaacaacatggcggagaacctgcagcagacggagcgccagcggcgggagttcatcaccaacatctcccatgagctgaagacgcccatgaccaccatcgccggctatacagacggcattctggacggcaccatcccgccggagaacgagcggcagtatctccagatcatctccgacgagagccgccgcctgagccggctggtgcggcggatgctggacgtgagccagctgcaggccatcgaccccctgcgggagggaaagcacttcgacatctgcgagagtatgcgccgggtgctgatctccatggagcggaagatcacagaccggaatctggatgtggaggcggatatccccgaggagcccattctggtgctgggggacaaggacatgattacgcaggtgatttacaacctgctggaaaatgccaccaagttcgcacgggagggctccactctctatctgggcgtcaccaccatcgacggcaaggcccgggtgacggtgcggaacgagggggacaccatcccggcagaggagctgccgctgctgttcgagcggttccacaagagcgacaagtcccgcagcgaggacaaggatggttacggcctggggctgtacatcgtcaagacgattttagagcagcataaggaaaagatcagtgtgaccagcgaggacggcgtgaccgcgttctccttctcactggccacagagtgaggcgtgcatggaggaagaaaagcagttggccggagaggaccgtctctccggagagatcgtagaggtatacagacagccgctgcccggggaggtggtggagcggtacagccgccccctgccgggacggcctgccgcgcccgggcagccccgccggcggcgcaggaccgggctgtggattttcctggcctgcctggcggtggtgctgggtgtggcggcgggctcctggatttggtatctgctgccggccggcagcagtgccgatccctttgagtaccgttacgaccacggctgggaggaggaagaggacgcgtccggggcagttaccatccccacctatccgttcggggagggcgccgtgctggaggtggagacggaccacggccgggagctgacggcccaggagatctaccagcgggtgaacccgtcggtggtgacggtcatggtccagctggacgacagcgtctccgtgggcaccggggtcatcttccgggcggacggttatatcctcaccaattaccacgtgctggcggggggacgggactgcaccgtcgccatggacacgggccggacctatgaggcccagtacgtggccggagacgagcggaacgatctggcggtcctcaaggtggaactgacggggcttcccgccgccaccttcggcgacagcgaccagctggtggtgggcgacaaggtctacgccatcggcaacccgctgggcgtggagctccgcggcacactgacagacggcatcgtctccgccatcaaccgggatgtacaggtggacggccggaccatgacgctggttcagaccaacgcggccctgaactccggcaactccggcggtcccctaatcaacgcctgcggccaggtggtgggcatcaacaccatcaagatgagctctgattactccaatgtggagggtctgggcttcgccattccctccgcctccatccggcggctggtgaacgacctgctgacctatggagaggtccggccggagccctccttcggcgtgacggtgctccagacgggcacccggctggaggacgacatctggggcctgcaggtgctggaggtcacgcccggctccgccgcagacctggcgggcatccgggagggggacttcgtcctcgccgccggcggcaggccggtggaaaccagtcaggagctgctgcgcatccggcggcagctgtatgtgggcgatcaggtgaccatggaaatctggcgggacggagagcggatggaagtgacgctgactctgaatgacccggtggaataaagaacgagggcgcggcctgcaccgcaggccgcgcccttgcttgccggaagtgctcccggcccggggcggaagagcggggtgtctgccctgcggggtagtgtggaaaaaacattgtgaggccgtgggaaaagccctgaaggacttctcccgcggcctgtgtcatgtctgtttcttccggcgctggggccacagcaggctgacaccggagagcagcaggtacacgccgaagggcttgcgcaggaccgccacgtccagattggtggcgatccaggccccggccagggcggcggccacggccagggggacggcgcttttcagggtgggcttgtccagatagccgcccctggcgtggcagaccagggcggaggcggcggtgggcaggaagaacagcagattgatgccctgagcggtccgctggtccacatccagaaagagcgtcatgaccagaagcagcagcgtgccgccgcccacgccccaggccgagaggatgctggcccccaggccgcagagaaagggaatgatccagtccgtcacagcagatacttcacccccgcgtagaacagaaaaccggcgaagagccacttgagccacttgacggagactctgccgtacagcttgccgccgatccagccgcccaccaggccgcccgccagatagggcagcgccgtcaggagggagagctcccccgaaacaggtacacggcggcggacaccagacacaccggaaagatgacgcccacgcaggtggcgtacagcttccgctgggagaggctgccccagcgggagaggatgggcaggaagaccatgccgcccccgccgccgaagaggccgttggccagccccgccgcagtgccggcgatccgcgccggccagcgatgttccatgtgatcccgcctttcctcagggatgtaagcggcgggcttcgggagccggagaggacgcccgaagcccgtcggacctggttatttcatctggaagctctggcagtcggtgcactccaccttggtggggttggtctcatgggtgcccacagtgatggtgttcagaccgcagtagttctggtcctggcagtggtgggcgcagttggtgaccgtgcacttgatgctctggttgggggtgcaggcgcagccgttgttggtattcgtcataacaaaagatcctcctgcgtgaaaaagtgtgtggctttcgccgccctctagtgtgcgcaggcgcggccgggttatgtacggtccggcctgggtaaaaatttgtcacaggcgggcgtgtccggcgtccggtttttggcgcggggcgcggcgacgcaatggccgtcatggatctctacaaaacggcggcgcgttcggatgtagtgctggtagtagtgtgcgcagtcggaacaggtgaacgaatccatatagggtgtctcctttctgattgagttcttagattgtactgcaagttgatgaaatcatcagaatgcattgtgacttcaaaatgatatcgtgatttcggttttttgtgcaaaagtattttataacaaagaaaatgcagaatatatgttaacttttatcacacaaaatatgtgataaaaattttatataaaaaggtgggccgctctatctgagcggcccacctttttcgatttggatgcctcgcagagtttcgcgccgcgcacggcgcgaaatcaaatgaaatcgtttttccggcggcgtgtacgtcggaaaaacactccgcgcggagcgagcgtcgaattgcccgccgcaggcgggcaaccgaggcgcagagcggagcgaatctcccttcacctgaaaaggcgcagccttttcaggtgatttatacgcctaagatccaagttgcgaatcggaagtagatcagcagagacagcgcgtccacgatggtgctgatgaagggcgaggccatcaccgccgggtcgaacccgatcttctccgccaaaatgggcagggaggcgcccaccagcttggcgcaggccaccgtgcccaccagggtgcagcacaccaccgccgccacggcaggcgtcacggtgggattggccagcagccagcagtccaccaccatcatcttcacaaagttggccgccgccaggcacacgccgcagatcagcgccacgcggcactccttccacaccacgcgcagcaggtcgctgaatcgaacctcccccagcgacagggcacggatcaccgccgtggaggcctgggtgccgctgttgccgccggtgccggagagcatggggatgtaggaggtcagaatgggcaccgccgccagggaattctcaaagtgggtcaggatcatcccagtgaaagtggcggacagcatcagcatcatcagccagggggtccgggcccgccaggtctcaaacacgccggtcttgagatacggcttgtcgcccggcaggatggcggccatcttctcgatgtcctcggtgacctcttcctgcaggacgtccatggcgtcgtccacggtgacgatgcccacaaggcggttctccgtgtccacaatgggcagggccaggaagtcgtatttgttcagggtttgggccacatcctcctggtcgtccagggtgttggcggagatcacatgggtatccatgatgtcccccaccacgtcgtcctcctccgacagcaggatggtccggatggagagataccccagcaggtggcggccctcgtcgatgacgtagcagatgttgatggtctccttgtccgggccggtgcggcgaatgcgcttcagggcgtcctccacggtcatggtggccttcaggtccacgtactccgtggtcatgatgctgccggcgcagtcgtcggggtatttcaggatttcgttgatgctcttgcggacgtccgggtccgcgtggcgcaggatgcgcttgaccacgttggcgggcatctcctccacgatgtctaccgcgtcgtccaggtacagctcgtccagcacttccttcagctccgtgttggaaaagctctggatgagcacctcctgctcctcagaatccagctccacgaacacctcggccgcctgctccttgggcagcaggcggaacaccatgggcaccttgtcgtccagttccatgaacaggcccgcgatgtcctgggcctccagaggcagcagaaggtcgcgcagctcggcgtagcgttttcgggagatcagatcctcgatcttttccagcagctcgtcccgctgctcttcctgctctaacatgcgcgtcctcctctctgtgggactggtggttgagaaaacaaaaaaacccggccgctcctgtccggtgcagtcggaaatttccgtgtcaaaacagggacgccgcatcagcggaccctgcggccgttcaagctttagcctcacaaggcggtgaaatcacgttagatgataccttcgtgttcgatagcacctgttcaaaccctctcatgatgtctccatcactccgcggcagcgatccgtatccctgtggtagccttacctaccggacggtatgcagttttgccgaaactctttcttcatattatgccaatttctgccccctgtcaaggcggcagaaaaaaactccccacaattttacaggcccctcaaataccgctgcactccattttacaaatgggaatcccgcttgtgatagaggacggcctgtggtataataagatgttccaaatctgtgcccgaaacggggcgtttcagcgagaggaggccctccatgggcatacacgacggacaccgggagaagatgcgccggcggtttctggagacggggctggagggctttgcggaccacgaggccctggagctgctgctgtactacgccatcccccggcgggacaccaaccccatcgcccacgccctgatggagcggtacgactccctctccggcgtgctgaacgccccggtggaggatctggagaaggtggagggcatcggggagagcgcggccatcctgctgtccctggtctcccggctcagccggaaggcccgcatagcggacgcgtcccaggagaccatcctcaactcctccgagcgggcgggggcctatctgctggagcgatttgccggcgagcggcgggaactggtcttcctgctgtgcctggaccgcaagggcaggctcctggcctgcaagcggctggcggagggggacgtggccagcgcggacctgaacatccgcaaggtggtggagatggcgctgctgacctccgccagcgcggtgatcctggcccacaaccaccccagcggcgtggcggtgccctcctccagcgacgaggccgccacccgccaggtggcggaggccctgcggaccatcggcgtccgcctggtggaccatatcgtggtggcggaccgggacttcgtctccatggcggacagcggcgacctgctggggtaaagagggagcaggcgccccctttagaacccccaccaccagtctgtggactggcgaacgcgcccaaggcgcttgggtcggggtattttgccacgtacacgccgcggcgaaaatgacttcaagttcttccttcgccgctggcgaacgaactggggaaaaccggaggggttcccctagtccccccttccttttttgtcccttcgcttttttcaaggcatggttcctttgataaaagtcgaacaaatgttgcaaaaagatgacgggtgtgataggatggccgtggctgaaaatctgtttgatgggtggagggaatgccgctatgccgaaatttgaagtcgtatctgaatacaagccctccggggaaccccgcaaaagcggcacttttgcggggaccccgtgattcggatggaccgggcaggcaaagcccgcccagtccaaggttttgactgcgccaaaacgcttgtgcgccgcggccgcggcgccggccctttgggccggggctggtccccggagaccatagcaagaaaaaattgcggagaagagctatgccgaaatttgaagtcgtatctgaatatcaaccctccggggaccagccgcaggccattgccgcgctggcggagggcatcgagaacgggctgaaggagcaggtgctgctgggcgttaccggatccggcaagacctttaccatggccaaggtcatcgagcaggtgcagcggcccacgctggtgctggcccacaacaagaccctggccgcccagctgtgcgcggagttcaaggagttcttccccaacaacgcggtggagtacttcgtctcctactacgactactaccagccagaggcgtatatcccccatacggacacctatatcgccaaggatgcctccaccaacgacgagatcgaccggctgcggctcagtgccacctgtgccctgctggagcggcgggacgtgatcgtagtatcctccgtgtcctgcatctacggcttgggcgagccggacgattttgccaacctggtggtgtccctccgggtgggggccgagtgggaccgggatgagctgctgcgccgcctggtggagatccgctacgagcgcaacgacatcgcctttgagcggaacatgttccgggtccggggggacacggtggagatctaccccgcctactaccgggaccacgccatccgggtggagttcttcggggacgagatcgaccggatcagcgacttcaacccggtcaccggcagcgtgaaccgggtgctgaaccacgtggccatctacccagccagccactatgtcaccaccaaggacaagatggacaaagccattctggagatccgccaggagctggaggatcaggtgaaatacttcaccgacaacaaccagctggtggaggcccagcggctccgtcagcggacggagtacgacatggagatgatggcggagctgggctactgctccggcatcgagaactactcccgcatcatctccgaccggcccgccggctccgcccccatgaccctgctggacttcttcccggacgacttcctgctgttcgtggacgagagccacgtgaccctgccccaggtccgggccatgtacaacggcgatcatgcccggaaggactccctggtgaagtacggcttccgcctgccctgtgcgtacgacaaccgaccgttgaagttcgaggagttcgaggagcggatcggccaggcggtgtttgtctcggcaacgcccggcccctatgagcgggagcgggcggaccaggtggtggagcaggtgatccgccccacgggcctgctggaccccagggtggaggtccggcctgtcaccggccagatcgacgacctgatggacgagatccgtgcaagagccgcccgggacgagcgggtactggtgaccaccctcaccaagaagatggcggaggacctgacggagtacctgaaaaacgccggcatccgggtacggtacatgcactccgatgtccagaccatcgagcgcatggagatcatccgcagcctgcggctgggagagttcgacgtgctggtgggcatcaacctcctgcgggaggggctggacctgccggaggtcagcctggtggcgatcctggacgcggacaaggagggcttcctccggtccgagaccagcctgatccagaccatcggccgggcggcccgaaacgcagacggcctcgttatcatgtacgccgacgagatcacgccctccatgcgggcggccatcgacgagacggaacgccgccgctccatccaggacgcctataatcaggagcacggcattgtgcccaagaccatcatcaagggcgtccgggagattttggagatctccaagaccgcggaggaggacaccctccgggcccacaagaagcgcaagctgacggagcaggagcgggcggcggagatcgccaagctggagaaggagatgcgcgaggccagcaagatgctggaattcgagtacgccgcggtgctgcgtgaccggatcatcgagctgcgggggagaagtgacctccgcaaagagcaggggtgtatggcgtactcgaatcgccgggagtccggcgtacaagcgttttggcggaggcaaaaccttgaaccgggcagaattcacttctgaccggttggtaaaatgaaaagggctcccgcacggcggagccgtgtgggaatgtacgccgcagtgctgcgtgaccggattatcgagctgcggggggagaagtgacctccgcaaagagcaggggtgtatggcgtactcgaatcgccgggagtccggcgtacaagcgttttgacggaggcaaaaccttgaagcgggcagaattcacttctggtcggttggtaaaatgaaaagggctcccgcacggcggagccgtgtgggaatgtacgccgcggtgctgcgtgaccggatcatcgagctgcggggggagaagtaaatgcactacgaatggctggacgcatacctgctgtcgtttcccggcgtggagaaggactatcagccggtgtggcagtggttccgctataaggtccggggcaggctgtttgccgctgtctgttcgccggggccggagtacaaaatttacggcggccacgatctggtgaatctgaaatgcggggcggcggagggcgagctgctgcgggcccggtatccggacatcctgccgggattttattcggataagcggacctggatttcctgcctgctggacggagaactgccggaggaggtcctgcgggacctgtgcggccggtcatacgccctggcggtggagaagctgcccaaatacgtccggcgggagctggcggagcagcccgcggagagctgaggtgtttgcaatggcgaagaaaaaagaggaaaagaccaatgtgatgcggatcctggaccagagaaagatcccctataccgcccggttttatgaggacagccaggggccggagggcacccgggagtacggcgtccacgtggcggaggctctggggcaggacccagccagaggcttcaagaccctggtagcccggggggcgtccaagggcatctacgtgttcgaggtgccggcgccggagaacctggatctgaagaaggccgccagggcggtgggggagaagtccatcgagctgctgcacgtggcggagatcaacgccgttaccggctacatccggggcggctgttccccggtggggatgaagaagcagtatcccaccgtgttccaccggacggcgctggactacgaaaccgtctatatctccgccgggaagatcggcgcccaggtggagctggcgccccgggcgctgctagacctgctgggggcctccacggcggacattgtcgtggaccagggataggcccaggtggagtcccagggtgaaggcgtcggtggaccactggaggtagcgggccagaaaggcgtcctgaaggcacaggcgggcgtccccggagagggagaggctgtccgccagctgatccacggatttggaatcgaaggggtctgctttctgcagaatgtcggcggcgtagccgtcgaagaggcggagatagatgggattcattggatcaccttcaaacaacatttaatgatgtattgatgatacatcattaaatgatatatgtcaaggagaactccatggaaacactaaaaatatttggagaaagactgcgtgccctgcgggatgaacggcatctgcggcaggcggatatggcagaagtgcttcaaattacccttgtccattatcagagaatggaatatggaaaggtcaatgtcccatcgctgacgctttgctttcttgcggattacttcagcgtcaccacggattatctgctggggcgcagcgacgcgcgggggtaaatccgttccgtgcacccgtaggggccaccgccctcggcggcccgatggtatggccgcccctggagcgtgtaagggaggttacaaaccgcccgtggaaatttgggccgccgtccggcggccacggggattctgctcccgcagggggcttgtccagccgggatgcaccccccgttttcttttccgacttgcggaaaagaaaacgggccgtgcacggtccaaaagaaaaggccgcttggacgcgctccggtgcagtggccctccgcgcgcaacgggggtcggcgtatcggtgcctgctccgatttggactggccttcgggcacgctatgctcttctgcgattcctgttgctgccgtcccgtggcggatggcgccgacctcgtcggggtggttgtcgcatggagctgcttctcttttcgctaccgctcacgctcccgcgaagaatccggcagcgcgtagcgcagcggaacgcgcggaaagagaagcagaccaaatgcgtccttgcaccccgttgacctttgcacccgcgccgcgggaatccgcgttcaagcctgtaccgcaccccgccgcgcccgtcgggaggtcatcgcaaacccgcaggcaccatctctcgtcaactcccgtacagcaactttgcacggacgtgcaaagttgcgaccaaaagcgttttttctcttacaccgggcgcggcgcgttctctttttggcgctgacaaaaagagaatggggggcgcatcccccgtggaaacggccccctggcgggagccagtctccccgggtggttgaaaagcgcctctacacctccgccggaggcatttccggcactgaaaagagaaacctctcctgaaaggagtcaatcatacacattatgcaggacaagatcatcgtcaaaggcgcccgcgccaacaatctgaagaatatcgacgtcaccatcccccgggacaagctggtggtcatgacgggcctctccggctccggcaagtcctccctggccttcgacaccatctacgccgagggccagagaaggtatgtggagtccctcagctcctatgcccggatgttcctgggccagatggacaagcccgatgtggactatatcgagggtctcagccccgccatctccattgaccagaagaccaccagcaagaacccccggtccaccgtgggcacggtgacggagatctacgactacctccgcctgctgtgggcccgggtgggcaccccccactgccccaagtgcggcaaggagattcgccagcagaccattgaccagatcatcgatcaggtcctctctctgccggagggcacccgcatccaggtgatggcccccgtcatccggggcaagaagggtgagcacgccaagatctttgaggacgccaagcggtccggctacgtccgggcccgggtggacgggaatctgtacgagctggacgaggagatcaagctggagaagaacaagaagcacaccatcgagattgtggtggaccggctcatcatccgtccggatatccagcagcggctgacggacagcgtggagaccgcctccggcctcaccggcgggctggtggtcgtcaacctcctgcgggaggagcgggatctgacattctcccagaattatgcctgcgaggactgcggcatctccatcgaggagctgacgccccggatgttctccttcaacaaccccttcggtgcctgtcccacctgtacgggtctgggcagccagctgaaggtggatccggaactgatcgtgccggacaagtccctctccatcctggagggggccatccaggccagcggctggaacaacatccgggggacggcatctcccggatgtacttcgacgccctggcgaagaaataccacttctccctcaccgacccctgggagaccctgccggaggacgtgcggagcatcatcctctacggcaccggcggggagaagctggagctccactacgaccagccccggggcaagggcgtgctgtatcagccctttgagggcatctgcaacaacgtggagcgccgctacaaggagacccagtccgatgccagcaagcgggagctggaggagctgatggccgagtgcccctgtcccacctgtaagggaaagcggctgaagaaggagtccctggcggtgaccgtgggggacaaggacatcgacgccctgacccggatgtccgtggtggacgagctccaatgggtggaccggctggagctgacgcaccagcagcacctgatcgcagaccggatcctgaaggagatcaagtcccggctggggttcctccagtccgtgggcctgggctatctgaccctcagccgcagcgcggggaccctctccggcggcgagagccagcggatccgcctggccacccagatcggctccagcctgatgggggtgctgtatatcctggacgagccctccatcggtctgcaccagcgggacaacgacaagttgctggcgacgctgcagaacctgcgggacctgggcaacaccctgctggtggtggagcacgacgaggacaccatgcgggcggcggactacctgatcgacatcggtcccggcgccggcatccacggcggcgaggtggtggccgccggtacaccggaggaggtcatggccaaccccaacagcctgacgggtcagtatctctccggcaagaagaggatccccgtgccggagacccggcggccgggcaacggcaagagcctgaaggtcatcggcgcggcggagaacaacctgcggcacatcgacgtggagttccccctggggacctttaccgtggttaccggcgtgtccggcagcggcaagagctccttggtgaatgagatcctgttcaagaagctgggcgtggagctgaaccggatgaaggtccaccccggcaggtgcgaccggatcgagggaatcgagtatctggacaaggtggtggacatcgaccagagccccatcggccggacaccccggtccaaccccgccacctacaccggcctcttcaatgacatccgggacctgttcgcctccactcaggaggccaagagccggggctacggcccggggcggttcagcttcaacgtccggggcggccggtgcgaggcctgctccggcgacggtgtgctgaagatcgagatgcacttcctgccggacatctttgtgccctgcgaggtgtgcaagggcaggcggtacaaccgggagaccctggaggtccgctacaagggcaagaacattgccgatgtgctggagatgaccgtggatgaggcggtggagttcttcgcacctctgcccagaatccgcaacaagctccagaccctgtgcgacgtgggcctggggtatgtgaagctgggccagccctccacggagctctccggcggtgaggcccagcgggtgaagctggctacggagctcagcaaaatcgccaccggcaagaccatctatatcctggacgagcccaccaccggcctccacaccgacgatgtgcgcaagctcctggaggtgctccagcggctggtggacagcggcaacaccgtggtggtcatcgagcacaatctggacgttatcaaatgtgccgaccacctgatcgacctgggtcccgaggggggagacggcggcggcaccatcgtctgcacgggcacgccggaggaagtggctgcctgccggtcgagcttcacaggtcagtatctgaaaaaggtgctggaaaagtaagccggggcagacgatccccttggagcccccgccggagcccagcgaagcgggtccggtggggaaaggacgggccgcggaggcagcaagccgaaggccggggcgcgggatccggagcaggcgaggacgcgcacaggcacgccggaggaggtggccgcctgccggtcgagcttcacgggctggtacctgaaaaagctgctggagcggtaagaccgcgcaaaaagggcctccgctgtatgcggaggcccttgtctatggggcgtcaattccagaagttcggaaacagcagctccgagatcaccttcaccagcagcaggagcagcacgaccaccaccgcaggccggacgattttgctgccgttcctgatggccaggccggcgcccagatagtgtcccaggatggaggccagagcggccgccagccccacacccagaacgacggtccccgccatcagggcggagcacacaccgccgatgttggaggccaggttgatgacctttaccccgccggccgcgtggcgggtgtccatcttgcccaagtggatgaacaccagcatcagaaaggtgccggtgccggggccgtagtagccgtcatacgtcccgatgagcagcgcggcggcccagacgatggccgcctgccgccggggcgggatgggggccggctcctccggccacattttggtccgcagggtgaagaaggccaccaccggcagcaccgccagcagcagatacttcagcaccacatccggcgtgtgaagctgcagctgggtcccgcagacggagcctgccaccgccagcccggcggcaggcaggaacagccgccagtgaacgtacccctggtggatgaagcgggcggtggaaaacgcggtgccgatgcaggaggagagcttattggtgcccaaaacaaagtgggtgggcaggccggagaaggccatcaggtatacagggacggagataatgccgccgcccccggcgatggcgtccataaagccggccagaaagacgccgccgcagatcagaaggaccacccacagggggaagccgtccagcgtggtttccgtgaagagagtggggaccgaggctgacatatatgcacctcccggagtaaattcgacaaaatctctatcagtataccagctccataggcccctggcaagagcagaagcgccgcaattttgctgaaattcccgcatctccccgaagaaatgccgccggaacggttgtttttccggcgggcgtgtgatactgtgaaacaggcggggcgggatcgcccgcgaaaatgctcaaagaaagttgaggatcacctatgtcaaacatcaaaaacgtcgccatgattaccgtgtgcggacggcccaacgtgggcaagtccagcctgaccaacgccctggtgggggaaaaggtggccatcgtctccaacaaggcacagaccacccggaaccgcatctacggcgtggtgaaccgggaggacacccagtatatcctgctggacacgcccggcctccacaagcccaagtccgccctgggggactacatggtgaaggtcgtcacctccagcctctccgacgtggactgcgccctgctgctagtggagcccatcccccatgtgggcggcccggagcaggcactcatcgaccggatccgggaggaggagatcccctgcatcctctgcgtcaacaagattgacactgtggaaccggcggagctgctgccggtgatcgccgcttacaaccaggcatgggacggctttgacgcgatcatccccatctccgcccacaccggcagcggcctgaaggatctgatgaaggaactgcggaagtatgcccaggaaggccctcagctgttcccggacgggatgacgacggaccagccggagcggcaggtgatgggggaaatcctgcgggagaagctgctgctgtgcctggacaaggagatcccccacggcacggcggtggagatcacgaagttctctgagcgggacagcggcgtcatcgacgtggacgccaccatctactgtgagaaggccagccacaaggggatcattatcggcaagcagggggccatgctgaaaaagatcagttccctggcccggcaggatatggagaagttcatgggcaccaaggtgtatctggagacctgggtgaaggtcaaggagaactggcgggacaacgtgaactacgtgcggagcttcgggtaccgggacgaataaggaggaagcgtgcggtctccggtattccgcaggctgccgtgcggggagtgagaatatgagactggtattgagcgacacggcactgccaaccggactgccggtccgggaggactggcactatgtggacctgagccagctgaaaatcgcggactgtatgggctgcttcagctgctgggtcagaacgccggggcggtgcgtgatccgggacgacgctgtaggcgtatatcccctgattgcccacagcgaccatgtgatctatgtcagccgtctcttctgcgggtcctatgacgtaccgatgaagaccatgctggagcgggccattcccatccagcaggcgtttattcggatacaccacggagagacgcaccatatacagcgggcggtggcggagaaagacgcggtgattctggcctatggagataccggagacgaggagcaggcgctcttccgtctgctggcggcccgcaacgcccataatatgctgtttcggagctggagtgtccgcttccttcgggaagaggagctggccggggccattagggaggaggtacgcgcatgggaaagctcctgatcgtcaatgggagtccccgggcgccccgttccaactcccggaggtatatcgaacagtttcttccgtgttggggagagacggcggaccagtataccgcgctgaggggtggaccgctctccccagaggactgtacggatctgctgctggtgttccccctgtacgcagacggcataccggcggtgctgatgaggaccctgaaggaactcgcagtatggaggggaacggcccgccccaggatccacgtactggtgaactgcggctttctggagccggagcagacccggcctgcggtagaaatggtgcgctttttctgcaaacgatatggatttccctgggggatggcgctgcagatcggctcgggagaggcgatcttgaatacgcctttttcctttctggtgcggcggggcctgcgccgcctggccgctggtatgcgggcgggacggagcgaggtgctgtcggtgcggatgccgctgaacaggcggatgttcgtctgggcctccggccggtactggactgattacggcgcgaaaaacaacatcaccgccggagagatgcggaccatggagatcgagggaggctagagatttccagccataaaaatccgacaacattcgcagactactcctgggaggaggtctgcggaatggacacacaaaggctttgggagtgcttctgcctcaccggcgaaccgctggtgtacctgctgtatcaggccgctctggaccaggagtccggcggcgggatcagcgcatagaacggagggcggacgctctccgtacataaggagggagcgcgttggccgagcgggcctacatcgtgacaaagggcgtggtcctgcgggagacggagacgaaagaggcggataagatcctgacgctgctgacagcggaccggggcaagatctccgtcatcgcccggggcgtccggcggaagagctgcaagtacgccgcctgcgcccagcagatggtctattcggagtggaccctctatcagaagggcgagtggtactacgccaatgaaggagccacggcggagctgttcaacggcctgcggacgaatctggaggcgctggccctgggctgctacttcgcggagctgacagagaccgtcacggcgccggaggtccctgccggggcactgctgccccatctgctgaacgggctgtacgccctctccgctttacagaagccgccggcgctggtgaagcccgcctttgagatcaaactgctgtgcttggcgggatatgaacctttggcggacagctgcgcctactgcggccggccggacccggagcagcccctgctggacgtggtacagggcatcctgcggtgccggagctgcggcgcgaaggagagtgccctctccatgcccctgtgcccggattccctggcggccctgcggcatatcgtgtacggggaccccaagcggctctactcgttccggctgacaggcccggcgctggagcgactctccgcggcggcggaggctttcgtggccgcccagctggagcggggattccggacgctggaattttacaagagcctccagccgccggaagagttgtcgaaataagatacattttgtatttcttttgctgatttatacgaaacggagcggaatatgacagaatttgtcctcggctcctaccggctggaggtggacgtggaggccacccgggcctggtatggccgttacggtaacgctaccgggggctgcggctgcgcctactgccgaaactatgctgccgcagttggggtcctgccgccagaagcagcagcgtttctggaacccctggggcttaacctccgcaggcccggagatattggcgagtatggtccccgccagggcgggcggtggtatatgcccatgtggcacattgcaggccgcctgctggaagcgggggagggagagctgcccgttgcccccggcgtcaccgccgggttcgccacagatatgggaccgttcctccggaacttcccggagccctgcttccagtgctggctttccatgaccctgccctgggtgctggaggaaccggcagatgaagcagctgacgacagggacgatgaagtgaaaacccttgacaggagaaccgaaccatgagtgacctatttgacaaatccatccgcaccctggagctgccccgggtgctggagctgctgagcgagcaggctgtcagcgccgaggccaagcagcgggccctgcgcctccggccggagacggagccggaggaggtgctgcgcctgctggaccagacggacgcggcccgaaatctcatcggcctgcggggcagtccgtcgttttccggcgtgaagccggtggcggaggccctggaccgggcggaccggggcggcgccctgaacactcgggagctgctgaccatcgcggatctgctgaccgccgcccgccgggccaaggagtacttcaacgacgaggcggcggagaaaaccgccatcgaccacctgttcctctccctccacggcaaccgctttctggaggagaagatcaagcgggccatcccggacgaggacaccatcgccgacgccgccagcacggagctggcggacatccgccgccacatgcgggcggcccaggccaagagccgccagatccttcaaaagatcatctcctcccccagctatgggaaaattttgcaggagaccatcatcacccagcgggacggccgcttcgtggtgccggtgaaggcggagcacaagggcgacctgccgggactggtccacgacatctcctccaccggagccacgctgttcgtggagcctatgggggtggtccaggctaacaacgagtatattgagctgcaggccaaggagcagaaggagatcgaccgcatcctggcggagttctccgccgaggctgccgcccaccgggaggacatccagtgggactacgacaccctggtccacctggacctgatcttcgcccggggccagctgagctacaagatgaacgccgtgcggccggaggtccgccgggacggcgctatccatctgcgcaaggcccgccaccccctgctggaccccaagacggcggtgcccatcgacatcgagctgggggacacctttgacaccttggtcatcaccggtcccaacaccggcggcaagaccgtgaccctcaagaccctgggcctgctgacgctgatgacccagtgcggcctccacatcccggcggcggaccggagcgccgtgtccgtctatgagcgggtgctggcggacatcggcgacgagcagagcatcgagcagagcctgtctaccttctctgcccacatggtgaacatcgtggagattttaaaagaggcggatcggcacagcctggtgctgtttgacgagctgggggccggcacggacccggtggagggcgcggccctggccatcgccgtcatccagcacgtgcggcggctgggggccaaggtggccgccaccacccactatgcggagctgaagaccttcgccatgactacggcaggggtggagaacgcctcctgcgagttcgacgtggagacgctggcgcccacctaccggctgctgatcggcattcccggcaaatccaacgcctttgccatctcccggcggctggggctgccggaggacgtcattgccgccgcccaggggcagatgagcggcgagagcgtccggttcgaggacatcctgacccagctggaggagaagcgccaggccctggagaagcgggagcaggaggcggaccgcctgctgcgccagcgggaagaggacgccaggcgcgcccgggagttccgggagcagatggagcgggccaaggacaacgcccggagccggggcgaggcggaggccaagcgcatcctccgggacgcccggacggcggcggaccaggtgttccaggagctcagcgagatgcggaaggcccaggccaaggccgaacggatgctgaacgaaaatgaggcccgtgcggccctccgccgcacgctgaacgaggcggaggaggccgtgtcccgccgcgacgcccggcaggagcccatccccaagcccagccgccccatccgggcgggggatctggtggagatccccggtgtcaaaacgccggcggaggtagtgtccgtgggcaaggacggcaccttgcagctgaaagccggtattttgaagatgaaagccaaggtagacgaagtgcgtcttatcgaggatgacgagcgggccgccaggaagaagacgccctctgtcaccattcgccagaacgccgaccgcgccctgcgggcttctgccgcccgggaactggacatccgagggatggagacactggaggcggagagcgtggtggaaaacttcatttccgccgccgtcatgggcaaactggagaccgtaaccatcatccacggcaagggcaccggggccttgcggaaggccgtccacgacatcctccgccggaataaggctgtgaagagcttccgcctgggcgtctacggcgagggagagagcggcgtcaccgtggtgacgctgaagtgagccggagcctgtcgccgcggtgcggcatcaggcgtcctgcgcggcgggaccttggagtgtgagggctctgcctgaccgccccaattaaatgcgggattcctgtggggtgctccccatgggggcggcgagcccggcaacactgaaatgagggggttgacatggcactgacctttcgatttgcacaggagaccgacacgctcctgatcctgcaattcatccgggagctggccgactacgagcacctgctggaccaggtggtggccgatgaggccaccctccgggaccagctgtttgaaaagcgccgagccgaggtcctctttgccctggaggacgggacagaggtgggcttcgccctgttttttcaaaacttctccaccttcctgggtcgggcgggcctgtatctggaggacctgtatgtccggccggagcaccggggaaagggatatggcaaggctttcttccggcggctggcggccatcgccgcggagcgggactgcggccgcctggagtggtggtgcctggactggaacacccccagcatcggcttctacaagtccctgggggcggagaccatggaggactggaccgtttaccgccttaccggaccggcattgcagaggctggcagaaccggaatctccggttgcggaaaccgatgagatttgatatactggagtcacactaaaacacacattctggaaattgcacaatgaggtgattttatgcaagagcttgcaaagcagttccacattgcctgtgctcagggggatatcggccgctactgcatcctgcccggtgacccgggccgggtcccggccatcgccgccctgtttgacgacgccaagcagatcgcgtataaccgggagttcaacgtctggaccggcaccctgctgggggagaaggtcaccgcctgctccaccggcatcggcggtccctccgcttccatcgctatggaggagctccacaaatgcggtgccgacacgttcatccgcaccggcacctgcggcggtatcgatctgaacgtccagtccggcgacgtggtggtagccaccggcgccatccggtatgagcacaccagccgggagtacgcccccattgagttcccggcggtggcggacttccaggtgacaaacgccctggtggaggccaccaagaagctgggcttccccctgcacaccggcatcgtccagtgcaaggacagcttttacggccagcacgaccccgctgcctcgcccgtgtactacgagctgcagcagaagtgggaatcctggaagcggctgggcgtcaaggccagtgagatggagtccgccgccctgttcgtggtggcggcggctctgggctgccggtgcggctcctgcttccatgtggtgtggaaccaggaacgggaggccgccggcctggaccagaagatgagtgaggacacatcctcctccgtgaaggtgtctgtggaggccctgaagctgctgattgaggcggaccgcaaggcgggccggtaattggctgcgtttttgaaaaaagatgcccggaaatttccgggcatcttttttgattccccattgacaagtttacttggtatatggtatgctctgcttgtaaagaaaacttggtaaaataaaaagtaaactatgcaaaatggttcggcatggatcgggaggagatcctgcggcacagccgggcggctggcgactggttctgatcctgagtctgctgctggcgggagccgcgttgttgaatctggccgtttatgtacggggcgtactgggatgagaggcaggccctatggcttggcaaagaaagaaaagggagaacgctatggaaaaacaggaaattctggagaagagccggcgggagaaccagaagggtgacgaacgggagcggaccatccgcatggagggggagtccttcagcctgctcttcgtgtttttgatgggcctgattctgctgacctggaagcgggtccatgggctgccgcatgaggatgtgctgaccatgttctggacggcctgcgtggccaaccgggtctaccggctggcccggcggcggaatacctccgacatcgtgacgctgctgatctctcttgcgtttttgatctggaatctggtaaaattctttcaaatggcctgagaggaggtagcgcatggaccgggatgagattttgaaaaaggctcaggcgggggcgattggaatggacgagcgggagcagcaggtactggggctgtcctttggtatcggcgggatcctgatggtactgctgtgtgtcattctcgccattatacggctggtgaacgggcaggatgcctatgactacacggccatcgtgtttctgtatctggcgggcgtagagctgcatttgtattggaggacccggcggcggggcttggcgttgctggcggcggcctgcggcctggtgttcgcgggcaacctggccatgttcctgctggggtgagcgccatggacgatcagctgatcctgaaaaaccggctgaaggtggcccgggcggagaaggggctgtcccagacccagctggcggagctggtgggcgtgtcccgcaacaccatcagctccattgagacggggcagttcaatcccaccgccaagctggcgctgattctctgcatcgccttggacaagaagttcgaggaactgttctattttgagtgagaaattaggagtttgggtgtccagcggcgctgaccggggcaaatcatcctgcctgcggcggagcacaatccttccgcatccctaactgacggccggtcgttccggagagaggagagatctctgtggagaaggagaaaattctgcaaagataccgccaagagggcgtggacgagggccgggaggaggtcaaccgccggggagacgacgcgggcttttacgccatgtgtgtcctggcgctgctgttgatgatctaccaggcgtttaccggacaggtatttggagacgtggcggcgatgctgttcgtgttttgctccgtgggggcctttgcccggtaccggactgaccgggaccggtccgctctgggcatgggcatttttaccggcgctctgtgcctgggatgcctgggatggtatctgtggcacacgctgtaaaaaagacaggcggcgctggaaagcgccgcctgcttgcttaccgcttccgcaccgggtagcagacctcggtgacaaattcttctgggttccgggtctcgtggggactgacgtggtagatgttgaagaacagtccgtcaaaggcatagccgttgtcctctacccaggatgccaccgcctgattcacctcgccgatctggcggtaggggccctggaaggtggcggaggccactgtcaccggcgggatggttttgaatttgacgtgctcggtgtcagggtatgtgcccttcaccgtcttttggatctccacatccacatctgcctctttgtactccccgtcgtggtagacgctgatgcacagggccgggtcgccgtcctggatgtggagaagggcggtctccctcacaaagatgtgccacaggtctccctcccggtcgtagcagggaaggatctggcggacgctggctacctgccgctccggcagggtcttgatggtgacatcgtagttcatctgtttttcatcctttctcagccgttcgatggttgtgtccagaagccgcagccggtccaatgcctcctgaatggaggcctccaccgctgcccgctgggccagcaggcgcgtctccatggcggtccggtcctcccagcaggccagcagcgcggccgtctctgccagggagaaccccaggccccgcagggcggtgatccggttggcggtcatcagctgggccgccgcgtaccggcggtagccggtccagggatcggtctcctccggcaccagcaggccgatctcgtcgtagtggcgcagcatccggatgctgattctggacagctttgaaaattctccgattttgaacataggatccctccgcatatatgcgttttcttgagctcactgctatggtatgccctgccactgtgtgagagtcaagagaattttttcaaagtcgcgatgagagaaaaaacgttccggccgcagaagcggccggaacggcggtgggctcagtcgtcggtgcggatgccccgttcaatatcccggatattgtagggggaggtttggtagacgaagtaattcagccagttggagtacagcaggtgggcgcaggagcgccaggtcaccgcaggcttgcggctggggtcatcgccggggaagtagttcttggggacccggatgtccgctccggcggtcaggtcccgtatgtactcattccgcagggtgtcccggtcatactccgcgtggcccatgaggaagatctgccggccctggtcggtcttgacggcgtagaccccggcctccggggaggaggcaagtatcttcagctccgggattgcctcgatgtcctcccgcagcactgtggtgtgccgggagtggggcacccagaactcgtcgtcaaagccccggaagaggatgaagttgggatcctccaccgtgtggcggaacacgccgaagagtttctccggcagctgccgcttggggatgccgtagtggtagtacagccccgcctgagcgccccagcagatgtgaagggtggagtggacgtgcgtcttggaccactccatgatctcgcacagctccggccagtagtccacctcctcaaagggaaggttctccaccggcgcgccggtgatgaccaggccgtcaaaggtccggtcccgcacctcgtcaaaggatttgtagaaggccagcatgtgggcctgggaggtgttcttggacacgtggccgctgggggcgatcaactccagctcgatctggatgggggtgttgcccaacacccgggccagctgggtctcggtctcgatcttggtgggcatcaggttcagcagcaggatctgcagggggcggatatcctgggtgatggcccgggtctccgtcatgacaaagatgttctccgacgtcagaacggaggtggcgggcagctggttggggattttgatgggcatctcacttcacctggtccagcgcctgggcgatgtcgccgatcagatcctgcttgctctccaggccgcagctcatccgcaccaggcccgcgggaatgccggcggcggcaagctgctcgtcagtcatctgccggtgggtggagctggcggggttcagacagcaggtccgggcgtccgccacatgggtctcgatggcggccagcttcagatgcttcataaaggtgcccgctgcctcccggccgcccttcagctcaaaggacaccacaccgcaggagccgtggggcaggtacttctctgccaaggcatggtacttgtcccctggcaggccgcagtagctgacggaggccaccttgggatgtgccgccaggaactccgccaccgcctggccgttctcacagtggcgggccatgcgcacatggaggctctccagccccaggttcagatagaaggcgttctgggggactggatggcgccgaagtcccgcatcagctgggcggtgcacttggtgatgaaggcgccctccctgccgaacttctccgcgtaggtgatgccgtggtagctgtcgtccggggtgcagaggccggggaacttgtccgcatgggccatccagtcgaacttgccggagtccacgatggcgccgcctaccgccgcgccgtggccgtccatgtacttggtggtggagtgggtgacgatgtcggcgccccattcaaagggccggcagttcaccggagtggcgaaggtgttgtccacgatcagcggcacgccgtgggtgtgggcggccttggcgaacttctcgatgtccagcaccgtcagggccgggttggcgatggtctcgccgaacaccgccttggtgttgggccggaaggcggcttccagctcctcgtcggtgcagtccggggagacgaaggtgacctcgatacccattttcgccatggtgacggagatcagattgaaggtaccgccgtagatggaggacgaggagacgatgtggtccccgcaggagcagatgttgaacaacgcgaagaagttggccgcttggccggaagaggtgagcatagcggcggtgccgccctccagctcgcagatcttggcggccacatagtcgttggtggggttctggaggcgggtgtagaagtagccgttggcctccaggtcaaagagcttacccatgtcctcgctggtggcgtatttgaacgtggtggactggacgatggggatctgccggggctctccgttgccgggggtgtagcccccctggacacatttcgtttcgatgcggtaatcgctcatggtgtgtgctcctttcgactggatgaagatgactttggagacgaaaaaacggctttcgtcccaaagaaaaactttgagacgaaagccgtcaggcttccgcggtaccactcaaattgcgccgtcctcacggcccgacgccccttttggggtccagcaacccctctgccctgacgcggcagtcctcggagaggccctaccggcggcgcgccgccctcgaaccctcggctcaggagccataggacctggagacccttgccgccggcttccaccgcccgccggctctctgagggcgccggtctccgtccctctccatcattgctttggaacatattatagccacgccgcggcaagtttgtcaactgcggattttcgcctcgcatggaccgcggcggcagtggacttttggcccggcctgtggtacgatggcccaaacggccggcggaggacgccggagagggaggagcgccatggcctttacgcccatcgacgagcagacctgggagcgccgggagtatctggaggttttccgccagaccgccatctatctgacggcggaggtggatatcacaccgctgtatcggcacacgaaggcccggggcgaaaagctgtatccggccctgatctggtgcgcggccgccgtgctgaaccggcatgtgcatttccgctacggccgggacgaggcagggcggatcgggatctgggatgtgctgcacccctattacaccgtgccccggcgggacgccccggacctattcgccatgaaggtcacccgctttatgccggactatgatgtgttccgccaggactttcaggcggactacgcccgggcggagacctgcggccgcctgctctgcgacgagaccctgcccccaaatgtctgcggtatctccgccatgccggggctggccttctccgccttcagcttcggcggggacctcaagccggacttcacgccattcgtcctgctggggaaggtccacccggcaggggaccggacggtgctgccggtaggcggagagtttgcccacgccgtcaacgacggcggccacatcagcggttttttcaaagagctggaggaaaccgccgccaaactgtttccggattgaaggagaaagagaccgcccgcggggatgcctgtccccgcgggcgtttttatcggaaagcagggcggggcaaaaaattccgcgctccccccttgacaagagatgtggctcatgctatattagccacacggttagttactagactaattaaccagataacaaaccggcaggaaagggggaaccgccttgacgttgacggaagaccggcccatcttccagcagatcgcggagcagctggaggaggcgatcctctccggggcctacccagaggagagccaggtgccgtccatcacggagtattcggtgcagtaccggatcaatcccgccaccgccctgaaggggatcaacctgctggtggacgcggggctgctgtacaagaaacggggcgtggggatgtttgtggcctccggcgcccgggagaagctccgccagagccggcgggagcggttttatcaggactacgtccagcggatggtgcgggaggcccggaatctgggcctgacggatcaggagttgctggaacttctggaaaggggaatgaaagaagatggccattgagtttcagcacatctccaagcggtttgcggacacccgcgccctggaggatgtgtctttgacctttgaggaggggaagatctacgggctgctgggcaacaacggcgctggcaagtccacgctgctgaacatcctcaccgggcggctgtgcccagatagcggcaccgtcgccgtggacggcgcacccgccgacagcgacgcggcgctgggcaagctgttcctggtgggggagaagaacctgtatcccgacgacatgaaggtgaagcgggccctggacacggcggccgtgttttacccggacttcgaccggagctatgcggagagcctggcaaagcagttcgaactgccgttgaacaagaagatcaacggcctctccaccggctacgggtccatcttccgtctgattttgggtctcagcgtcaacaccccctatgtgctgtttgacgagcctgttctgggtctggacgcccagcaccgggacctgttctacaagctgctggtgcagaaatacgcggagcacccctgcaccatggtggtctccacccacctgatcgcggaggtggcggacctcatcgagcacacggtcatcatccggaagggacgcatcctgcaggacgcgcccacggaagagctgaccgccgcctgctgggcggtgtccggccctgccggggtggtggacagctgggccgccgggcgggacgtgtttacatcctctgtgctgggcggactcaagaccgtctgcatccggggcggggggacagaggacctgcccgccgggctggagcggcggcgcgtggggctccaggagtattttatcagcctgatggaagaggaggatcagagatgaacacgcgattcggccgggccttccggtatgaggtccggaattatttccgggcagtggcgatcctgtggctggtcatggcgctgatcccggcggcgatgctggcaatcacctatttcctggccggagagacggctatggagggcagcttcaacggctattccattgccgtggggatgttcggccttgtgttgggcatggtgggcctgcgggagaatcagcgggtgctgaaccagaacggcgtgtcccgtcggtccgccttcctggcggacgtggccgccctggcggtggcggcggtgctggtggcagcgggtgtcacggtgattatgggcgcctatcaaacagtcttgggcggccagggccggctgctgattacagatctgtaccaggtgatctatgaaggaccctccgccggtgccgggatcggtggcctggtgcggggcgcgatcttctccgccgcggtgggctggatgctggcggccctggggcagttctgctccgccctgtactggcggctgaacaagttctggaccatcctgatttccgtgaccgtgccgctggtgctgatcttcggcagtgtgccgctgattagctggctgggcaccacctccgccgggcgggcggcggtggaggccctggcggctttcggacagttcctggccgcatccccctggaacgcggcggcggtgctgctggccatgggggcggcgttcttcgccctcagctggctgctgctgcgccgggccatgatccggcctgcaaagtaacagataaaagtgaaaagataaaggataagagatcttcccaaacaagggcatctcttatcctttatcttatatctgatatctccgggggcgctccatgtgtcctattgtccgcccacgatgcggctgtacgtgcgggtggtaaggccgtagaccaaggcgtagatggcgcagaacaccagcagcgtcccggcggcgcagagggcgaacagacggacgtcaaagaggttgaacagctccagcagtttgcacagcatggggaaggctgccgccacatggatgcccgccgtcaccaggggcaggaagaacaccagcagcacctgactgcggatggaggagcggacctcccggggactcatgcccacctgctgcatgatctgatagcggcgctggtcctcatatccctcggaaatctgcttgtagtagatgatgagcaccgtggacagcaggaacagcagccccagaaacacgcccaggaacaggaagccgccgtacatggtgtacaggtccacagcgttgtcctgatggctgatgacggagtacacgtcattggcgtccgccgccagcagggggtccacaaaggccagcttttcctcttccgtgccgtccaggtccacctggacacgaaattcccggtggactctgctggcatcccggtcgctgatggcggagactacggtctcatccgccaccaccaggaaaagctgcgccgtctggccggagatcaggatggagctgttgtatcggggaaagtccatgatggtcccagcgatgtgaaaagggaggtcttcgatatagaaggtatccggcaggtccagattctctgcctggaccagcacctcttccggctccaggtccacggtatggccggtgaggcggccgtagtcatcggcggtgagcaaccggatttcggtgctgacgccctcctgcgccacaagggtgaaggtgtttcctgtgtaatagccgacggtgtcccccggagtggaccactggagcagttccaccttccggcccgcgtctgctgctgcggcctggacccgttccagggtgtcctcgttcagtgttgtctcctgttccggcggcacttcgtccagggactggaccacgtccacatcatagggatacatccgctccaaagctccctccagcccggcgtacaggctgacggtggtggataccgtcaccagcaccatggtggagaggatgcagatgttggccaggcccacggcgttctgcttcatccggtacagcagccccgccacggcggtgaagtgcttgggctggtagtagtaccgggggctgttccgcaggtgcttcagcagggcgatggacccggcggtgaacaggcagtaggtgccgaccatcaccagcgccaccgccaggaagaaataggccagggcggtaaaggggtcctctaccgtcagagcggtggcatagccagcccccagagtgacggcccccagcaccaccagcaggcggcgggtccggggctcccgctccccggcactggcgctgtggagcagttccacaggacgggaccggagcagcccgaacaggttccacaccagcgtcagcaggaagaggaagccgaagagagcggcggtatcggccatgccggagaggctgatctcaaagccatactccaccggcaggtgggacagctgcaataggagcagcagcaccagcttgctcaacagcacccctgccgcgagcccgcccacaatggccgcggcggcgcagtagagcgtctcccacaccatcaggcgggcggtgtggcgcttctccagacccaggatgttgtacagccccagctcccgccggcggcgcttcatcacaaagctgttggcgtacagcagcagaaccgcggagaacagcgtcaccaccagccggcccaggtacatcaggctttggagatatccggcccccggacggaggccacaatgtcgctgaaggtcaggtaggagagaatgtagtacatggcggccgtcatgccgcaggagagcagatacggcccatagaaccggccgttgcgcatcagattcaccagggccaagcggggaaagaatccggacttacgcatggggctcaccgcctcccgccaggaccgtcagggtgtcggagatccggcggaactgggcctcctggctctcgccgccccggtagagctggtggtacacctgtccgtcccggaggaacaacacccgtccagcgtggctggccgcctttaccgagtgggtgaccatcaaaatggtctgcccggtgccgttcagttctccgaacagctccagcagggcgtcggaggaccgggagtccagagcgccggtgggttcgtctgccagaatcaactgggggtccgtgatgagggcccgggccacagcagcccgctgcttctggccgccggagacctcataggggtatttcgccaagatgtccgagatgcccagctgatctgcgatggggcggagcttttgctgcatctcccggtagtctgtgcccgccagcaccaggggcagatagatgttgtcctgaagggagaaggtgtccaacaggttgaagtcctggaacacgaaccccaggtgggaccggcggaaggccgccagatcccgctcccggatggcagagaggggcctgccctccagtaaaacctccccggcggtggggcggtccagggccgccaggatgttcagcagggtggtcttgccggagccggactcacccatgatggccacgtactccccctcctccacggagaagctgacgttggacagggcctggacctgcgtgccgccgaagcgggtggtgtagattttctgtacatgctgtacttccaacaatggcatcaagattcctcctcgtatcggatcatgcctctattgtagccaaagggccggactgtctgccatggatttggcttacagtccggcccgattccttacagtttcgtcacattgggtcactccaccacccgtcggccccgggagaggtccagccgcaccagcgtcccctgcccggggcgggagacgatagagatcccgtggttcagccggtccatcacccggcggcacaggtacagcccgatgccggtggatttcttgtcctcccggccgttgtagccggtgaagcccttctcgaacacccggggcaggtcctccggccggataccgatgccgctgtcggcgatgaccagcgtctctccgtccccgtagatccggatgcggcccccggcgggggtgtatttcagggcgttggacagtacctgctccaccacgaaggagagccacttcccgtccgtcagcaccgtccgcccggtctcccgaaagtccagggtgatctttttcagaatgaacatccgggcgaacttccgcaccgcctgccgcagcaggccgtccaggtccgtgtcccggaggacatagtccgtgctctcgctgtccagccgcaggtagcccagcaccatgtccacatactgctcgatcttcaggagctccacttccacctccgtgcccacagcgccgggatcctcctgcaagagcagccgggccgcggcgatgggggttttaatctggtgggcccagagggtgtagtaatccgtcatgtcctccagccggtcccggttctccgccgccagacgcacccggtcggcgcagaccgccctcagcagggcctgatagtccgcctccagtacgccccggggcggcggcaggggcagcaccgactcatggacctttcgtaaaagcccttccagctcccggtgccgccggagaaaggcggagtaccccagggcaaacaggaccagccccagcattaggcagagaaggcctgcataggcaaccgcctccaccggcaggctgtacagggcgaacacggcggcgaacaccgccaccgccccggccagcagcaacagcagcttccactggcgcttgagataggctgtcagcattccgtcacccctccaccagatatccggcgcccttccgggtgcggatgaaatccgggaggcccgccgcctccagcttccgccgcagccgggcgatgttcaccgtcagggtgttctcatccacaaagctgtcggactcccacagccgggtcatcaatgcgtcccggctgacgatctcccccttgtgctccagcaggagctgcagaatccggcactcgttcctcgtcagctccacccgctgcccgtgggcatccagcgtcccatcagacacgttcagcaccgcggcgccgcaggagagcaggtgggaagacgggccgaagtcgtaggcccgccgcagcagggcctggaccttggcggagagcacctgtaaatcaaagggctttgccagcaggtcatccccgcccagctgcatggccatcaccacgttcacattgtccgaggcggaggtgagaaataagatgggcgccttggagacccggcggatctcctgacaccagtggtagccgttgaagaaggggagggagacgtccagcagcaccagatgggggtcgaaggcggcgaactccgacaagacgtcgtcgaaccgctccgcgcagcggacggtgtagccccagccctccagatggcggcggatgaccccggcgatggccgcgtcgtcctccacgatgaaaatgcggtacatgagcccctcctctccccccgcggtcagttcagctccagggactccagctgggagatgatctcctgctggcgctcgtagaacagcagctcctggttgtgggtgaaatacgcgtcgcagccgtagcggctgatgaaggtggcggcgtagtagttgatggtcagctccgtcaccaggatcagcagctcctgcccctccgggaacacctcctcgcagaaggcgaagaggttgttcagcatctccccggcggtcttggcctgggctttcaggccctggaccatctggtcgaagtccgccttcactgcagcaaagcccgtctgactgtccacggtctgtccagccagggctttctgccgctccagagcggcgatgatccggcggtgagagcgctccgcctcctgggagagactgccagaccgcctgccggtgtcgatgcgggtcttctgacggcgcagctgttcctccagcagagcggcgagatccgcctccggcgcggtcagggcggctttcacgtccttcaggatgccaagcagctcccgcagcatctcctcccgctccaccacggagcgcagctcgccggtggcggcgtccagcagcagacccagcagggacagccgctcgtcgaacttggcggcagaggcacgctggcggatggccttggtggccttgccggcgaggatcttgtccacctggtagtcgctgcggtacttgttgaacaggtcgtagtaaaccgcgaactccttggcgatcttgggattctggagatattggatgatgagcttctcatccaccggcaggtggttctgctcgtacaggtgaatcatctggctcaggtcatcccagccccgggcggtgacgaaccgcttgccgttcaccgtggactccaccttgtagaagtcacccttccggatctccaggtacgtcatcaccgccggatggacgtgcttctggtaggcaaactccttccaggcatcgaagtccggctccacgtcgatgcgcttgagccggtcccaggtaacgatgtcgaactcccggacggagcggttgtactccggcgggttgccggcagtgaccacgatccagccctccggcacccgatggcggccgaagattttatattgcagaaattgcagcatggaaggggccagcgtctcgctgacgcagttgatctcgtccaggaagaggatgccctcctttttgccggtggcctccatagtctcgtacacggaggcgatgatctcgctcatggtgtactcggagacctggtactccttgcggttaaagaccttcttctcaatgaagggcagacccagggcgctctgccgggtgtggtgggtcatggagtaggacaccaggcacacgtccaactcctgggcgatctgctccatgatggcggtcttgccgatgcccggagggcccatgaggaacacaggccgctgcttttccaccggcactgcgtagctgccgaactcatccttggtgaagtatgccgtcatggcgtttttgatctgttccttggcctctttgatgttcatggtcattcaacctgactttcctcagtatcggtatgattcaaagcgcaaattccgcgtccagaaaatctgtgtccgccccagccgtctcccggggccagcggcggttgcagtagtccagaagaaaggcggtggcctctgtcagacggctgcgcagcaacaggtccaccgcggcccggcagttgtcctggtccagaaagcccaggtctgccagctgcagcagctggcggcgcagggcgtcgttgtccgtcagggccaagttccggcgcagatgctccagataatgttccttgggccgcatgtgccggaagtcgttggtgccgccgttggtgtagaactcctgataggagtggccccgcagcagggccagcgcgtagatcagccgctcctctccggtgaagcggtcctcctgccggtagcaggcgccgatctccggggcgtacccttcctcttccaaagagaaacccagatagaaggcgtattccagccgcttcaactgggcgtagccctggcacaggaagatattctcccgggaggtgtcctgccggacggtgccgttggcggcccgctcgtccaaggcggccatcaggcagtcccagtggaccatggcgtgaatggggcgcatgcggggggccgcaatagcggtcagcgccggggagatggggcgggcgccgatggcgttggtggccagccggaagagaaaggcctcctcgtcggccagcttctccgacagccagtccaggctgtcctgaaaggcgaacacatccgccgtgccgccgtattccacgatccgcaggttttcaaagcgattcaggccgtaaaaggcatccacatccgggggatcaccagaatctccacgccccgcagggcgggcacggccttggcactgacccgggccaccggcccctccggctgcaccacggcccggcggccctccagccgcaggcattccacttgtgtttccatggttcagatctcctcgctctgtaataccagcttgatggcccacaccggcacgtccggcgggtcgtacccgtcgtccagaaaaacgaaggccgcgtcgtagtccggctttttctccggaaagatgccgcggccgtcggtgaagtagatcatgcccttgaggttggtgaactctccggcccggaccagctcgtccacgtactgaaacaccgggcggaagtccgtgccgccgaagccgtggagctgcatggtgtccagatagttgtcgaagtccttctggctggtgatcttccggtcctcctgcacctccgcgtcgcactggatgatgtggagattgatcttggtgaagaagttttcctgctggcgcaggatgttgtaggtcttggtgacgaaccgctgcaccaggtcgccgctgacggagccggaggtgtcgatggcgatgacgaattccttgatccgccggacctccttgtactccagcggctccaccaggggcatattgccgtacagggacagaccgtaggtgtagtagatatagtcgaactcgtcctgattcacctgggtgacctcgcccaggctcatatagcggcggaggaagtccgcatagtcatacgtctcccggttcaccgccttcagctcctggaccagattgccggcatcggtgccgtggcggcgggatatggtctccaggtccacctggagtcgctcgctgatctcccgccaggtctgctccaggtcacggtcccgccgttccgtgccggacttgggcgtccgggcccggctgccctggccgccccggccggacttctgcttgccgggggtgccggtctccggtgtccggccgttggactggctgcctcctccggcgccctggccgctcttcaccggcagataccaggcccggtggtcgtccgccaggaaggggtcccgcagccgggccatctgatcgtcggagagctgccggtccagaaagtaccggtagagcttctccgccgtcaggagccgcacctgggagcggagctccttcagcgtctcctcctgggcataggcccggttgcaggcggcgctctccaggtggaggtcctcaatggcgctttccaccgcgatgtcgcaagccaggtcccagcaccgacggtcgatgttggcgctggtgaacaggtgccggaacacacagtggagcacgatgtgcaggtagtcccgcacattccggccccgctcccgcttgtacatggacaggacgtagtacgtgtcgtaaaacaggtgctggccgtccgtggccagggtacctggataggaggtcagctggaactggctgagggccagatccagaaaccgaaggttcaccagcagggtgttccgggtcaggcgcaggatattctgagccagggcgtccgcctggcggaatttttccacatgatcttccataagcacaactcttcccgaaagggcgccgggcgcccgatgttctgaccctttattttagcatggggataccggcaatgcaagaaaaacgccccggacggcgtcttgcgcccgccgccgggagatgatatgataaacctgtatgaacacgaaagatggagtggagacatgagaaagctggtcgttggaatattggcccacgtggacgcggggaagaccaccctgtcggaggcgctgctgtatcagagcggcgccctgcggcgcctgggccgggtggaccaccaggacgcctttctggacacggacgccatggagcgggaacggggcatcaccatcttctccaaacaggcggtgttttccctgaaggacacggaggttaccctgttggacacgccgggccatgtggacttctccgctgaggcggagcggacgcttcaggtgctggactgtgccattctggtcatcagcggcaccgacggggtccaggcccacacccgcaccctctggcggctgctggagcggtatcacgtccccaccttcctctttatcaataaaatggacctggcgggggcagaccgctccgcagttctggcaggcttaaagcagcgtctgggcagcggctgtgtggatttcagcggcgaacgggacgaatcgttccgggaggaggcggccgtctgcgatgaatcagtgctggagcggtatctggagaccggagttctgacagacggcgacctgcggcgaatggtcgggaagcggaagctgttcccctgctggttcggctctgcgctgaagctggagggggtctcggaattcctggagggggtggaacagtatgccccggttcccgcctatccggagaccttcggcgcccggatctacaagatcgcccgggacggccagggcacccgcctcacctatttaaaagtgacaggcggcaccctgcgggtgaagagccttttgaccaaccgccgccccggtctgggagaggaccaggtgtgggaggagaaggcggatcaaatccgcatctactccggcgccaagttccgcacggtggaggaggccccggcggggacggtgtgcgccgtgacaggtctctcccgcagccgggcgggagagggcttggggcttgaggccggctggactgccccggcgctggagccggtgctgacctatcaggtgctgctgccggaggggacggatccccacactgccctgggcaatctgcgccagctggaggaggaggatccccagctccacattgcctggaatgagcagacccgccagatccacgtgcagctgatgggggagatccagctggagatcttacaacgcatgatccgggagcggttcggcctggaggtggccttcggccccggcaccatctgttatcgggagaccatcgccgccccagtagagggcatcggccactttgagcccctgcgccactatgcagaggtccatctgctgctggagcctggggagcggggcagcggcctggagttcgggacggcctgcccggaggaccagctggagggccgttggcagaggctggtcctgacccatctggcggagaaggagcacctgggggtgctgaccggctcccccattacggatatgaagatcaccctggcggcgggccgggcccacgtgaagcacacggagggcggcgacttccgccaggccacctatcgggcggtgcgccaggggctgatggaggcggagagcatcctgctggagccctggtacgacttccgcctggagctgcccgcacctcaggtaggccgggccatgacggacctccagcagatgggggcgcagctgtctccgccggagacagcgggggaggaggctgtgctcactggtgctgtggcggtgtccgctctgggggactacgcccgggaggtggccgcctacacccagggccgggggcggctgctctgttccctccggggttatgcgccctgcgcggaccaggacgctgtgctggcgtccgtcgattacgacccgacggcggatttggacaactccccggactccgtgttctgtagccacggcgccggcgtcatcgtcccctgggatgaagtgcccgcccgggcgcacgtgtccagcggcctggacctgggaccggagaaagaggagctggcggggaggtctgatacccggcgcgcctctgtctacgctgggaccatcgagcaggataaggagctccaggccatcttcgagcggacctacggccccgtgaagcggcgggcctttattcccccgaaagacccccggcgccctgctccgacagcggaggcagagcaggaaaagcggaccatccgggagcagttctccggaccggagtacctgctggtggacggctacaacatcatttttgcctgggatgagctgaaggccatcgcccgggacaatctggacgccgcccgcaagcagctgtgcgatctcctcagcaactaccggggcttccggaagtgcgaggtcatcgccgtgtttgacgcctataaggtcaagggcggccagggcagcgtggagaagtaccacgacatccacgtggtctacaccaaggaggcggagacggcggacgcctatatcgagcgggccacttacgagattggccgccgccatcgggtgcgggtggctacctccgacggcccggagcagctgatcattctgggccacggggccctgcggctttccgccagcgccttccggcaggaggtggagcaggtggaaggccagatcgcggacatcctggccgccaacaaccgcaggcagaagaccggaaacgtccgctccgccctggagcgggcccagagacagacagaggaggagaagccatgatcggattgagctgtaccgcaggcgcggtgctggccctctgcggccaggtccgcggaaccctggagcgcaaggggctgccccaaaaggagctggacggcggccgggtgcggatcgaaccccggtacaaccagggctccggcttcggccttgtcccgctgaacggccggcagatggcccccctgtccctggcggcgctgtgggcgctgctgggggtgtgcggcggccggggcctgggggccggactgctgctaggcggcggactcagcaacctgtgggaacggatccgccatggacgggtcctggactatctgcgctttccaaaggcgccggggccgctgaagaaatacacctacaatctggcggacctggccatcttcctgggcgctgtgctgatggtgctgcgccgcagaaggcagtaatatgagccgccctgcgtgattccacgcagggcggctctcttcataaaaatttaagaaatttcacagttttttcgtaaaccaagggaatctatactgaatttacgaaaaaaacacggaactgtaactgatttgtaaattgacaattagttgtgtttgtgtatatactaactgtactagtacgggcagtacagtttttttgaatggcttaaaaatttgtcattgacaaatttcaaaattgtgttactgtattattagaataatacaaaaagagacatcgtaacggaccgcactctgccgcgtcttatgtgagacattttacagacatttgacgcaaacgccgtgggatgttgatctggtggcgttatactggaactgaaaaaatgttccggaagttgaagcgttcggcggggctgcgtcgtataggagaacaagacgaaagaagggaacctgttatgaagatcctgattaccacagattggtatacgcctgcggtaaacggtgtggtcacctctgtgaaaaacctgcagcgggagttggagcgccggggccatgaggtccggatcctgacgctgtcccagtcgctccactcctggtcccgggacggcgtcaccgccatcggctccgtaaacgccggacggatctatcccggcgcccgcctccgcaccgccatggcgggccgctgggtacgggagctgatggactggcggccggatgtgatccactcccaatgtgagttcagcacctttttcctggcccgccgcatcgcagaggagctggatgtccccctggtccacacctaccacacggtgtatgaggactacacccactacttctcccccagcgtccggtggggccgatgtgcggtggcggctttctcccgctgggtagctgcccaggtggacggcatgatcgcccccaccggcaaggtgcggggactgttgcagggctatggcgttcgctgcccggtcttcgtggtgcctacgggcatcgacctgcggcgcttccagcaggagggcgatcccatgcgccgggcggttctgcgggccagcctgggcatccctgcggaaaacactgtgctggtgtgcgtggggcgccttgcggaggagaagaacatccaggagctgctgaagctccgggcctccctgggcagccgccctgtgacgctgttgctggtgggggatggtcctgaccggccccggctggagcaggtggcccacgatctgcggctggaggccccggcagtgatctttgccggcatggtgcccccggaggaggtgccggagtggtaccggctgggggacctgttcgtcagcgcctcctccagcgagacccagggtctgacctacatcgaggcactggccgccggcgtgcccgccctgtgccgggcggatctctgcctggagggcgtcatcctggagggagagaacggctggcagtaccacagcactgtggagttccggcagcggctggaggagttcctggccagcccggagacccacgaagcgctgaagcggcgggccgcagagagtgcggagcagttctccgcccagcggtttgcccagcgggtggagcgcatctatcagatgcagctggcccggcgggcggccagctgtgtccagggggtgaccgcatgagccggggcgtggaaaagaccgctctgcaggcggcgtccctcttcggactgattttgtgcgtgctgaccggaatctgggcctggcaggcaggactgctaacctcccaggagcggctgcaggcctttgtggccagctgcggcgccgccggcgggctgctgttcgtggcgttccagatggtgcaggtagtggtgccggtgctgcccggcggcctgggctgcctggtgggcgtggtgctgttcggcccggtgatggggtttgtctacaattatgtgggcatctgcatcggttcgctgttggcctttgccgtggcgcgcaactgcgggcggccgctgttgagcctgctgttttcggaaaagctcatcgccaagtacagcgattggacagagcggaatgaccggtttgcacggctgttcgccctggcgatctttttcccggtggcgccggacgacttcctgtgctatctggcgggtaccacctccatgacctggcggcggttcaccaccatcatcctgctgggcaagcccctttccatcgccctgtacagcctggggctgacggtgctgttccagcagatcacaggctggctggggtaaagacatccgcggacgggcggatcggtaaaggagacacacatgcgcgtttttatctacaatggcggcctgcgcctggtcggcaaaagcggtgtgggacaggccatcctccaccagcgggagatgctgcgccgggcccggatcgacactgccgaccattggtgccagcgggccggggccgtccatatcaacacggtgctgccggattcggtgctggcggctctggcggccaagctgatggggcggaaggtcatttactacggccactccactatggaggatttccgcagatcctttcgaggctcggaccggctggcacccctcttccgcaagtggatcaccttctgctacagcctgggcgacgtggtgctgacccccacggaatactcccgccgtttgctggagagctacggcctcaagccgccggtgtacagcatttccaacggcgtggatacagagttcttcgcgccggatcccacccggcgggcgtccttccgccgccgctggggcctccgggaaggggagcgggcggtgatttccgtgggtcacaccattgcccggaagggactgccggaattcctggagctggcccggcggatgccggaggcccgtttcctctggttcggctggacggatccccatctgatccccaggagatccggcaggccatggaacaggcgccggagaatgtgaccttcgccggctttgtagaccgggagacgctgcgggaggcatattgcggcgcggatgtattcgccttcatgagtcatgaggagaccgagggcatcgtggtgctggaagccctggcctgcggcattcccacagtggtgcgggacatccctgtttacaacggctggctgcgggagggacagaatgtctacaaggcctccggcacagacgagttccagcagaaggcggaaggacttctgacagggacattgccggatctgacagccgccggccgccgggtggcggaggagcggagcctgtcggtgatgggggagcgcctgcgggaggtctaccggcggatggacattctgccggcagcgcagccggcggcaaaaacgaacctccctcaggcggagagacccgtacagcacagcttcacaccttaattcccggtattcctacgggataaggataccctggcgagggatggttccccatagcgcccgcttccattccggttctgcgggccgccgatgaagagaaaaagcgcctccggcaaaagccggaggcgcttttggcgcgtttactggggcagcgtctggaccacgccgcgggcacagtccacagagaccatggcaccgtccttcaggcgctggacggcgccggcggcgcccacgatcaccgccttgcccaacgtcaggcccacagtggccgcatggccgttggtgccgctctcctcgctgatgacagcggccgcctgccggatatagggcaggaggtcgttggtggtgtagggcaccaccagcacatccccggggcggaacttggcggccacatcctccagtgagcggcagacgcacagggggccggaggcgttgctggcccccacgccgacggcgttgagcagggccccgcccaccagatggaccttgatcatattggtggtgccggagacacccacgggcacaccggcagtaatgaccaccagatcgccctgcttcacgagttctgccttctctgccgcctggatggcgaactcgatcagctggtcggtgttctgggcatagggcatcagcaggggcaccacgccccagtacagggccatctgccgctggacccgctcactgagcaggcaggccaccaccgtggtgccggggcggaaacggctcaccagccgggcggtggcaccgctctggctgacggtgaggatggcatcggcaccgatgtccatggcagtggtgcaggcggcatgggccgtggcggcggcgatggacaggcggctggaacccggcaggttgcgcatccgcttggcgtagttgatgtccgcctcggtccgcagggcaatggcatccatggtctgcaccgcctccacggggtatttgcccgccgctgtctcgccggagagcatgatggcggaggttccgtcgtagatggcgttggccacgtcggtgatctccgcccgggtggggcggggattctccatcatagagtccagcatctgtgtggctgtgatgacaggcttgccggcggccacgcactgggcgatcatgtccttctggatgatgggaatctctgtgaagtcgatctccacgcccatatccccccgggccaccatgatgccgtccgccacggacaggatctccgccaggttgctgaccccctcctggttttcaatcttggcgatgatctggatggaggagtctgcctcatccagcaggcggcggatctcccgcacgtcgtccgccgtgcggacgaagctggcggcgatgaagtcaaagccctgttccacgccgaagaggatgtcctcccggtcccgctggctcatgtagggcatggacaggcggatgcccggcacattgacgcccttgttgtttttcatggccccgtcgttttccacccggcagcggacgtccgccgctgtggtctccagcaccgtcaggcgcaccaggccgtcgtccagcaggatggtgtcgccggccttcacgtccccgggcaggtcggcgtaggtgatggagcagccttgctcatcccccacgatgtcccgggtggtcagggtgaactcctggccggtccgcagcatgacggaacctgcggcgaaggacttcagccggacctccggccccttggtgtccagcatggcggccaccggcaggcccagctccgcccgcagggccttcagggcgtccagacgacccttgtgctccgcgtggctgccgtgggagaaattgaaccgggccacgttcatgccggcctccagcatctgccgcaggacgccctccctgtccgtggccggaccgagggtgcacacgatctttgtctttctcataaataaaaatccacctttcggtcaaaagggatacaaactgtaagacagtttatcacaaagccgcagcgcaaaaaagtggaaaagtgttcaataaacaagagggatccgccaaaaggcccgtcagcgcgggaaggctcacatccccagcttttcccgcagggcggcgatcatctcttgatattcgccctcggagagcagcaccggcttcggattcgtgatggcaaaggaaccgccgaactcgaatccgccctcgtatttgggtacgatatggaagtgcaggtggggattcgtatcgccgaaggagcccaggttgatcttgtcgcagccccacagttccttcactgcaccggaggcccgggccagatcccgggcgaaggcggccagctcctccggcccgcactcgcacagctccttccggtggttcttcagcgccagggcgcagcggcccttgtgggcctgatccttgaagagatagagcacaccggcctccatctcgccgaccttgtacatgatggcctcccggccctcgtgatgttcatcgcagtaaaagcatcccatggctagatctccttttgtcagaatacggaggaaattttccccttattaccatacaacccaaaaccgccgccgtcaagcatcagttcaggattgcgccggggcagaggttctggtatcatcagggtatcaagaacgaagacggaggaggaatcgacatgaaactcggcttggtgacggacagcctggtagaccgctccctggcagaggcagcggccgtctgccggggactggggctggagcaggtggagttgggctgcggcaactggtccccggcgccccatgtggacctgaaagggctgacggcggacgccggtgcccggcaccggctgctggatactctgggggaaaacggcctcacgatctccgccctgaactgctccggcaaccccctgttccccggggagaagggagccggagacagggcggtggcggagggcacgttcctcctggcggagcagctaggggtggagaccgtggtgatgatgagcggcctgcccggcggctgcccggaggaccgcactcccacctggatcgtcacgtcctggccgccggagacggaggaaatcctccgctaccagtggaaggcggccgtcccggtgtggaaggcgctggccgcccgggcccgggaccacggggtgaagcgcatcgccctggagttccatggctggcagctggtgtacaatgtggagacgctccgccgcctgcggagtgaggtgggagacgacattctgggggtgaatctggaccccagccatctcttctggatgggggcggaccccgtggaggtggcccgcgccctggcggactgcatctaccatgtccacatcaaggacgtgcgcctggagccggctgccgggcagaacaccctgctggacaccaagggcgtgctggagttcgccagccgctcctggaacttcgtcacccccggcacaggccacgacgccgcctggtggcgccgctttctggagacgctgcaggactgcggctacgacggcgccctcagcatcgaacaggaggattacaccatcccgctggaggaggccctgcagaaggccgtgtccctgctgcggcaggcgctgcccgcctgaaatacgcaaagccccgcctcacgaacgaggcggggcttttttcagaacaggatcaccgcaggaaattccagtacagggtaatggccgccgccagcaggagctgcacggccaggatcaccggcacgcccacccgaaagacccggtggagcgtcttgtggcggaagaggtacatccccagcagggcacccacgctgccgcccaccacggccagaagcaacagatttttctccggcacccgctggcggaaccgggggtgtttggccaggagcttgtctacgccgaagatcaaaaaggtcacagtgttgatgagcaccagccaggcggccagcagccccaggggagagccgatgaaggcaacgatacggtcattgtgctctgtgggcagatagagtgtcttttcttccataacggccgcctcctgaaacagcactggactggccgggagttcccagccagtccagtgtagcagaagtttcagtttttggcaagcttgctgagttccacagcagtggctgccgccagcttggcgttgttgtacaccagctggatattggaggccagggagtcgccgccggtcagatccttgatcttggccagcaggaaaggcgtggtctccttgccgtggatgccctgagccttggcctcctccacggcctcgtcgatggccttgttgatgacatccgcgtccatggagtactcctccgggatggggttggtcaccagcatgccgccgcccaggcccatatcctgcttgacataaaaggctttggccagctccgccggggtgtcgatctcatagtccacggcaaagccgctcttccgggtgtagaaggcgggcagctcgcgggtgccgtagccgatgacgggcacgccgtgggtctccaggtactccagggtcagccccaggtccagaatggacttggcgccggcacagaccaccatcacgggggtgtgggccagctcctccagatcggcggagatgtccatggtggtctcagccccccggtgcacgccgccgatgccgccggtggcgaacacggagatcccggccatgtgggcgataatcatggtagtggtgacagtggtggcgccgtccctgccctccgccaccagcacgggcagatcccgacggctggccttggccacggcagggccggtcttgcccaggtagtcgatctcctcgggagagaggccggccttcagccgcccgccgatgacggcgatggtggcaggggtggcgccgtgttcccggatgatcttctccacgttcagggccgtctccacattctggggatagggcatgccgtgggagatgatggtggattccagtgccaccacgggacgaccctcgtccagggccttctgcacttcaggggcgatgtcgagatacttgttcagagccatgataaaaacctccagatttgaattttggttattcgatggggaatggggtgtcaggaattggaaatggggggaccgggaactttaaagcccagcccgcagcttcagcgcttccgcgctcatggcggggttgatggtctccgccccctccatggcgatggcggaggctgccagacccgccttggcggtgcccgtcagatccgtgcccgcaagataggcccaggtgatggctgccatgaaggcatccccgcagccggtggtgttcaccatctccgccggcaggacgggcaggtgcacccgctccccggaacggtcggcggcgaacacgccgtctccgcctagagagatgaatacccggtgaagaccggtggccagcagggcgtccgcggcggcgcgcaggctggcctcatcggtgatggccacgccggagagcagctccgcctcgatgcggttgggcttgagggtgtggagcctgcccagcaccggctgcaacttcaccgccttggcggtggagaccgggtcggcaaagataggcaccgggcagttctctgccagataggcgatgctctccgcgggaatattggtgtcgatcaccagcacctggctgccggacagcagcttctgccgctgagagagcagctggggtgtcagatggcggtagatgtccatgtcactgaccgccagcagcatgtcgcccttctcgtcattgatgaagagataagtggaggtgtgcccctccgggatcaccggggattgggagatgtcgatgcccagttccccgcagctggcggcgatcttctgggcgtacaggtcgtcgccgaaggcggtgaccatccgcacgtccaggcccagaaggctcatgttgtgggcgatgttccggcccacgccgcccagactcatccgcaccgcgccggggttggagtcccggtccaccggcacctccgacggccagccgccgatgtccatgttgacgccgcccaccaccgtgacatagggcgctgtatggacgatgtagcctttgccggtgatgtagcccttcttcatcaggttggagatgtgcaccgccacggaggaccgggtgatgccggccttctccgccagttcctgctgggagatgagagggttttcttcgatccagttcagaatctgccgttcccgctgggtcatggcgccgcctccttgtaagcaaaaattaagatatataatctaatgcttagtttatctgtttttttgaaaaagtcaagacccaatttttagccgtcagccgtctgtgggacggggatgcccgcttcgcctgccgcaggtaccggacagagaggtgctgatggggcgggagcttcatgttctcccagcggaataaaaatcgcgccggaagtggaaccaaaccgccgcctttgccgactatacaggcagaggaggcgatgcttcatgaaaaaatggtgcctgtttttgagcctgtatttctgtatctgtctgctggcagcctgcgccggaggggacgtctccgccggtgcgggggccgattccggcggcacacccgcggaggagacccggaccggaggagagacgacggagcccggccgggtgacggagaccttccggctggtgactgtgggggacggcgatgatccggcttctgtgctggccgggacggacggcggggccggagctgtgtacaccctggacctcttcagtgtggaagacctgactatcgagggatacacccaggaggagatggacctgctggactggtctcccatgcctggcgctctggtggaggtcacctgggacggctccgtcatggagtcctaccccatgcggttcggcacggtggcctccgttcgcatcctggaggacggctttgacgatctgtgccggctgcacctggacgtgctgaacgatctctgggaggtggaccccagcctgaatgatggcatcacggagctgggggtggacctgtccgggacctccctgccggaaagcgaacaggccgcggtggcctatgccttcggctccgcccacgggctgatggctatggagggcacatatcaggacttcgtggacagcgggtatatcgacggggaagcactgttctggaaggacggctgcctgttctccgtcaaagagacccaggatgaaaacccggtgacctttaatctgcccagtttcggtcctggggacgagatgccggactacagtggcgtccgctttgacgcggagaagtggcgcagcggcctgggggcctatttcttcacagactgcaccgctgtccgaaatggcggcggccagtggggcgattacaccgtgggggcggaggcgatcgcctgaaaaccgggaaaacgcccgttccctcttgtaaaactatttgaaatggagtacaatatccatgattatgcagccatttccagcaaaaacaagaaaacgggtgaagtttatgagctatacgaaaatcgcggccatctacgccgacagcgaggcactctccggccagacggtcaccgtgggcggctgggtccgcaccatccgggacatgaagaccttcggcttcatcgagctgaacgacgggtcctgcttcaagaatctccaggtggtcatggaggccgggacgctggagaactataaggatatcgccgcccagaacgtgggcgccgccctgatcgtcaccggcaccgtcgtcctgacgccggaggccaagcagcccctggagctgaaggccgcctccatcgaggtggagggcacctccacctccgactacccctgcagaaaaagcgccacagcgtggagtttctgcgtaccatccagcacctgcggccccggacgaacctgttttccgccgtgttccgggtgcggagcgtggcggcctacgccattcatcagttcttccaggagcggggcttcgtctacgtccacacccccatcatcactgccagcgactgtgagggcgccggcgagatgttccgggtcaccacgctggaccccaaaaatccgcccatgaccgaggatggggaggtggacttctcccaggacttcttcggtaaacctgcgaacctcaccgtctccggccagttgaacgcggagaacttcgccatggccttcggggacgtatataccttcggccccaccttccgggcggagaactccaacacccagcgccacgccgccgagttctggatgatcgagccggaaatggccttcacagacctgaagggcgatatggatgtggcggaggccatgatcaagttcgtcatccgtcaggtgatggaaaagtgccctcaggagctggcctttttcaacagcttcgtggacaagggcctgctggagcggctggagcacgtggcctcctctgacttcggccgggtgacctataccgaggcagtggcgattctggagcagcacaacgacctgtttgactacaaggtctcctggggctgcgacctgcagacggaacacgagcggtatctcaccgagcaggtgtacaagaagccggtgttcgtcacggattatcccaaggagatcaaggcgttctacatgcgcctcaacgacgatgggaaaaccgtggccgcggcggactgcctggtacccggcatcggcgagatcatcggcggcagccagcgcgaggagcggctggaaatcctggaaagccgcatccgggagctgggcatgaaccccaaggactactggtggtactgcgacctgcggcgctacggctcctgcaagcacgcgggcttcggcctgggttttgaacggctggtgatgtacctcaccggcgtcagcaacatccgggacgtcctgccccacccgagaacggtcggcagtgcggacttttaaaaaataaaatcgactccggcgccctgtccatctgcttggacagggcgccgttttttgcggttgtggggacggagggcggtacccttctgcgcattgccggcggtccgctgcaacagtttttcttgaggagaggcggggccctagtgtatagttaggaaaaactcaaaaggaggaaaaaaatggaaagcgatacaatggaacttctgcgcctgatgctggcgcatctgcggcccaggcttcagggacgggacgaagagtggcaggcgctggagcggaagcagcaagaactgatggccagcttccgggaaacccacggcggggacgtgccgctgctggaggaggtcctggagatggaggacgcctgggctggcgcgggagaacgggcctgcgccgcccacttctttctggggctgcaaatgggcctggacctggggaagctgaactatctgcgggaggaataggcgctgccccggagtgcgcgtgaaagagagcgcccggaccacgtggcccgggcgctctctttcagttagatgaagaactgtgccggatcaggccagcacccgcacgcagcggtcgatgagggtcatgtggaccgcttcgccctctgcgaagcgcttggacagctgggggttgtagacctccacgatgatgggctggtcgcccagcatgacctcgtactccactttggcaccgtagtaagtggcccgggagacacggccggacagggggccctcttcctcagagaggagaatagactccggacgaaccgccaggcagcaggggccgtccttctggacgccctccatcttgccgggggcggggatggggaaggtgtggccgcccacttccaccagggcgttctcgccgtccatgccgcggaaggtgccgtcgatgaagttggccttgccgatgaagttggccacgaaccggctgttgggctgctcatagatctctgtgggcgtgccctgctggcagatgacgccgtccttcatgatgaccacccggtcggagatggccatggcctcggactggtcatgggtgacataaagggaggtgatgcccagccgtttctgaagggcccggagctcgtcccgcatgctctcccgcagcttggcgtccaagttggacaggggctcgtcaaacaacagcacgctgggctcaatgaccacggcgcgggccagggccacccgctgctgctgtccgccggagagctggttggggaaccggcgctccataccggtcagctgcatcagctccatgacggcgttggtgcggcggaccacctcatcctgggagaccttggccactttcagaccgtaggccacgttctcccagatgttcagatgggggaacagagcgtagctctggaacaccatggagatgccccgcttgttgggggggatcttggcaacatcccgctcaccgataaacacgctgccgctggtggggtactcaaagccggagatcatccgcagcgtggtggttttgccgcagccggaagggcccagcagcgtcaccatctcgccgtcctggatgttcaggttgatgtggtccacagccacgaaatccttgccggtatccggctgctggaagatcttggtgatctcttttaaaaccacgccggagctctttttgcccagcgccgacttttccatctgcttgctcattttgtttcctccgttttctcgtgaatgcctgcgcccttgggcaccctggagcggggggccagcagcaggttgatcaatccgttgaaaatgccgataaacaccagcaggattacgaccatcatggtgacgaaggccgcagcctggctgtattttgcctggtcaaagagcgtgtagatcttgctggtgaccagatcccagcggggagagaccaggaagatgatggcgctgacggcagtgatggccttcacgaaggagtacaccaggccggagaagaaggcgttgcgcagcataggcagggagatccggcggaaggagtagccgctgccggcacccagaatggtggaggcctcttcaatggagttgtcgatctgcagcagcgtggtggtgccggactcaatcgccaccggcatattccggaacacgaacacgatcaccaggatggcagcggtgccggtgagcactaggaagccggtgttgaaggccaggatgtaggcgatgcccagcacagtgccggggacggcgaacatcagaacagaggacacctcgataaaccgtttgccgtagtagtcccgcttggcggtgatgtaggcgatgaccatgcccagcaggccgccgatcagcgctccgatcagacccaggataatggagttccgcaggctgtcccagccctgctgcaaggcgcgggtgtactggtccagggtgagggtgtagtcgtagccccaggtcttgacgaaggaaccaaagaccactgtgccgtagaacaggatgatgaccgcggccaccaccaggcagacagcgaacaggggccatttgatatggggctcatcgatgagcttgcgggcctgggtgggcttgcccgtgacggtgacgaaactctttttgttgacccagtatttgttcagcagataggccagcatggtaggcaccagcatcaaaagcgccagcacggagcccttctgcatgtcatagctgccggtgatggtttgatagacttccacagataaggtggtgaaatcgccgccgatggtggcgggattggagaagtcctccagagactggatgaacaccagcaggcagccggagatgatgcccggcagggacagcggaaaggtgaccgtccagaaggtgtgccaccggctggcgcccatgttgcaggcggcgtcctccaccgatgcgtcgatggaggagaggatgccggagagggtcatataggcgatggggaagaaactcagcacctgcaccacgatcaggctgcccatgccgtagacgtcgttgtccgtgatcttcagcagcccgttggtaatcagcccctgccgcccgaacagaaagatgatggacaggcacagaatgaagggcggggacaggatgggcagggtggcgatggtcttcagaaagcccttgcaggggacgtttgtgcgggtgatggtataggcgaagatgtagccgatgaaggtggcgatcactgccacgatcactcccagcaccatggtgcggccgaacgtctttaaataccgggaggtggaaaagatctccgccgcggtagccagggagaaagtcccggacgcatcggtcaggctgaagagcagaatcttcaccaggggatagatgacgaataaaagcaggagcacgatgaccgtaaggatcgagatcagcatgatgggctgacgcatgatcatcttggattcgttccgccttttcaggcgggcggcgcttttgccgcccgaaccagcagcgtttgccatttgggttcctcctgttgattttcaagcgtttggcaagaggacttcctccccgccggggaggaagtcctgcaggcatagagagaatcttccggaattactccagattttcagagctggcgatgttcgcctcgaactgcgcgacgaactcgtccttgtgctcggcagcccagacggcatcatagtcgatgacggccacggagtccagcgtcaccagaccctcggccggagtggcctgggagttggtgggcacccggaaggaattgttctcggcatacaggttctgaccctctgcagagcacatgaagtcgatgaacttcttggcgttttcctgctcgtcagcgggaccgcccttgatcagggccatggcacccacctcatagccggtgccgtcggtggggaaggacagctcgatgggatagccctcggtggtgggctgcagaccgtcgtgagagaaggtcagggcaatggccgcctcgcccagggccacgccgttgggagcggcggaaccggacttggtgtactgggacatgttcttgtccagctccttcaggtaatcccacacggcatcctcacccttcagctggatcagcgtggccagaacggtgtaggcggtgccggaggtggcggggtgggccataatgatcatatcctgatacttgggatccagcaggtcatcccagctggtgggataatcataccctttgtccgcgaaccagtccttgttgcaggcgaaggcgatggcgcccacatagatggggttccacacgccgtcggggtccagatagttctccggggtgttggacagctcgggggactgataggcctccagcaggccctggttggaggcggcgatgtagttgtcggtggagccgccgaacatcagggaggcctggggattgtccttctcagcagccacgcgggtcagcatctcaccggcggagagccgcagagcgttgaccttgatgccggtggcctcctcaaacgcgttgaagtagtaggccacctcggcctcggggaatgccgtgtagacggtcagctcgttgctgccgctggactccccaccgtccccttcggaggaggtgtcactgttgccgccgccgcaggcggtgagcattcccagcgtcatagccagggtaaggagcagcgcgaatagacgtttgctctgtttcataagagtgtctccttttcaccaattttaggttccggatcctccgggattttagggatattgtagcatctccggaaaagagtgtcaataattggtaacgtttgcacacaggagaaaccccataaggcaaagacaaaaatagaaaaaatgtatttgtataagagacaaaaatggcggcggcgctggctttttccggaagttttgttaaaaagcggaaggggaaattggtgaaactataaaatttatgacagcgcttactttcaaacacgtgcccttcaaaaccgtttcgtatccccgggacccggctggactgaaattgcccaaatttttctccaggctttaggcaatcagccgaagatttccgccaaagtgtggaagatattgacttctcttccggcttgtgataaacataaaagaaacaatttgggcgctttgggttcgtcgaaatttgtcaagaatgctgagaatggcgccgttcaaacagctttatttaaccatgcaaccgtttccgggaatatgcggcaacatctgccgcagaggtgacctgccgaaagagaggggagagttggcggagccattcctcccctttttattgtttgactgcccggcgcggggcggagagaggagtgtgcacagaatgatggaaggactggcatacctgcgggagatgaacgtggcctccgtcctgctgcgcctgactgtggccatgctcttcgggggcttcatcggactggagcgggagcggaagcgccggccggcaggcttccggacctatatgctggtatgcttgggcgcggcgctgaccatgctgctcagtcagtatgagagctatatggtgacccacgcctggcatgagaccgccatggagatcggcctgcggacggatgtgtcccgcttcggcgcccaggtcatcaacggcatcggctttctgggtgcgggcaccatcatcgtcaccggcaagcaggaggtgaagggactgaccacggcggcgggcctttgggcgtccgcctgtatgggtctggccatcggcgcgggattttacgagtgcgtacttttgggcttcctgctgatcctgctgaccaaccggctgctgcccttcgtggaggatgccatcatcgaaagcgcccggaacatgaacatctatgtggaattccagacgctggacaatctgggggacatcattgcccgcatcaagtctcagggcggacagatttacgaagtggatctggaccggggccgggaggagcggtccaagaatcccagcgcggtgttctccattcggctgcccggcaggcactaccacgtccgggtcctggcggcgatctccgagttggagagcgtctacaccattgatgaaatctgagggaggtgcggagattgctgccgatttttgacggtgtgcgggatgtgaccgtgctgtccaccacgctgcggatgctgctggcggtggtgtgcggcggtctcatcgggctggagcgggagtacaagcgccggccggcggggttccgcacccatatcctgatctgcctgggggcggccatgacgaccctcaccagccagttcctttatttgaacctccattactacacggacatggcccggctgggagcccaggtggtggcgggcattggcttcatcggcgcaggcgccatcatcgtcacccggcgccgccgggtgaaggggctcactacggcggcgggcctctgggcggcggccattgtgggcctgtgcctgggcggcgggttctacgagggcggcatcttcgccacggcgctgattctggcggcggagatgttcctgtccaagctggagtaccggatgctggacaacgccccggaggtgaacctctatatggagtacagtaacaagacctgcctggacaatgtgctgcggctgttccgggatttgaacctgaaggtgctgaacatggagattacccgctctacggagacggagacgcacaatgcctgcgccctctttaccctgcggctgaacaagcggtgccgggtggagcagctgatccccaagatgaacgccacggagggcgtggtgtcggtagaggagttgtaacagcggcgcaagccggaagaataggagagagactatgaaaaaacgtatgacgtactggtgatcggcccggtgtccctggatcacaacatcgactatcagggcaacgaacgcaaggaggtgggcggcgccgtggtggcctccggctttgcggctgccaaaagcggcaaccgcaccgccgtgtttaccaagctgaatcccgcggatgcggatgtggaggagcggttcgccgggtccggtgcggatgtgtactggaagccgtctcaggccacctgctccatccgcaaccagtatttcaccgccgacaaagaaaagcgggcctgcacctccatgggggtgtgcgatcccttccggttcgatgagctgccggatatcgagaccaagatctatcacttcgccggcctggtgtacggcgacttcgacggtgccctctttgccgaggcagccaggcacggcaaggtggcggtggatgtccagtgcctgctgcgccatgtggaggcggacaggaccatggccttccacgactgggcggaaaagaagcagtacctgccggtgatcgactacctcaagaccgacgcggcggaggcggagatcctgacgggcctcaccgatcgggcggaggccgccaagctcctgcacagctggggcgccaaggaggtcctcatcacccacaacaccgaggtgctggcctacgacggggtgaccacctacacctgtcccatcaaggcacggaacctctccggccggaccgggcggggcgacaccaccttcgccggctatatctcggagcgccagcgggccggggtggaggaggccctgcggtactgcacggccctggtctctctgaagatggagacgccgggccccttccagggcacccgacaggatgtgctggattatatccgggagttttattgagaaggcacaggagccgtccgcagacagcggacggctcctgtacaaaaactccattgacaacgggtattgtccgtgataaggtaacaagtgtcaattatataaaggcaaacgaagtccctagagaaacggcgcaagcctgccgaaggagtgaaactctcaggtgtcccggcacgggatgaggactagggatggatgtggctctggagaagctcagatgagtaccgaaggtgcaaggcgggaaatcccgctgaatctctcaggtaaaaggacagagtaaagggcaggcccttccgcacagcggagggggccggcgctttgttgggctgggcagggtctgtccggcccttttcgtttgcggacaaggagagagaaaacatggacatggatctgttggccgcaaaggtcagcgaactggccggctttgtgtggaacggcctgctgctgtatctgctggtgggtaccggcatcatcttcaccatccgcacccggttcatccaggtgcgcaaattcggcgccggcttccggcggctgttcggcagcgtgaacctcaacggcgagaaggccggcaaggagggcatgagctccttccaggcggtggcaacctctatcgccgcccaggtgggcacaggcaacatcaccggctgcgccaccgccatgatctccggcggccccggcgccatcttctggatgtggctggcggccttcttcggcatggccaccatctacggcgaggcggtgctggcccagaccttcaagaccaaggacgagacggggcacgtcatcggcggacccgtctactacatccggcaggcattcaaggggaccttcggcaagatcctagcgggcttcttcgcgctggctatcatcttcgccctgggcttcaccggcaacatggtccagtccaacgccatcagcaacgccttccaggaggcgctgggcatccccacctggatcgtgggcgtggtgctggcggtggtggccgccttcatcttcctgggcggcgtcacccgcattgccgccgtcacggagaagctggtgcctgtcatggcctgcttctatctggtgggcggcctcgtcatgctgattgccaatattaccaacctgcctcacgcctttgccctgatttttgagggtgccttcaacccccaggccatcctgggcggcgccgtgggtatcggcgtgcgggaggccatgcgctacggcgtggcccggggcctgttctccaacgaggcaggcatgggttctaccccccacgcccacgccatggccaaggtggaaaagccccaggaccagggcgttgtggccatggtttgtgtgtttatcgacacctttgtggtcctgaccataaccgccctggtgatgattaccagcggcgcgctgaacgtgggcgacatggctgccaatccggcggcggagaacatggcccaggtggcgttttccactgtgttcggcagcttcggcaatttctatgtggccatctgcctgctgttctttgccttctctaccatcatcggctggtacttcttcggcgagcagaacgtgaagtatctattcggtgtgaaggctgtcaaggtctacgcctgcattgcggtggtgtgcgtggccctggggctgtgctggaggctcccctggtctggaacctctccgacctgttcaatgcgctgatggtgttccccaacctgctggcgctgctggccctcagcgggctggtagccaaggcggccaggggaggggacgccctgcgcaaataagcgccccgcccagaaagagaccctccacccgaagttccgggcggagggtctcttcaagcatcccgggcggggagggccggaccgccctggccgtaggggagggtgaagaccgggatgccctccatggccggggcgatggcgtacatgggataaaaaaacgacagaccctccgccgtaagatagaagttctgcgggttgaaatggcgccgcagcagccggcggacgccctcatggtaccgggagatcccagccgtctcctgccgctggatctccgcctccgctgcctccatcagccgccgcttccatccgctgcggcggggaaagaaggcggacagaggcaccggatagccggaggtcagatcccaggtatccccatggcgcagaagcgtggggcgccctgaaaagccgctctcccgggactgggtatacaggctccagaggccgccgtcgttgtaggtgacctgataggtcagctccgcccggaagtggggcaggggcaggctggccgccagagcagcgcggtattcctccgccgccgcaggcaggaggtacgtctcacaatagcgtaggaaggaacggcactggagctggtaataccgccggatgcggcgggagactttgtccgctgctggaactggttccggcagggagatggaggcggagagcacagggatctcctctacggtccattcccgctccgcggtcatggcctctgcgtgcagctgggtgagaggttcgttcataggcgccgctccttccgaaaagatgctgttctgcaccagcctatgccctgccgccgggcggggtgactggacacgctttaaagtgcaagaaattttttctgtccggagccctttactttcacgcggcagagtgttaaaatacatcttggcggcgaagcgccgcaaatctgttggagcctcccagaaagggtactggatatggtaaagatcggcaagaaggaaaagaacggcgagctgtacaaggcaattctgctgctgaaggacgagcaggagtgctatgagttcttccaggatctgtgtaccgtgtcggagctgcgggccatggagcagcggttcgaggtagcctccctgctggacgacggcatgatctataacgagatcctggagcgcaccggcgcctccagcgccaccatcagccgggtgaaccggtccctcagctacggcaccggggcctacgagaagattttcgcccggtacaagaagcgggacaaatgagcagttatgacgccctggccgccagctacgatgccctgacagtggatgtggaataccgccggcgggcagactacctgacgcggcagttccacagaagcgccctcccggtggagacggtgctggacctggcctgcggaaccggcaccatggcctgcctgctggcggagcggggataccggatgatcgccgtggacggatccgaggagatgttgacccaggcggcctggaaggcggcggcgttggagcagccgccgatgttcctgcaccagtccatgccccgcctgcacctgggcatggaggtggatgcggcgatctccaccctggacgcgctgaactacctcacccggacggcagacctgcgggagacgctgcggcgggtataccgctggctgcggcccggcggactgttcctattcgatgtgaacaccccctacaagctccggcggatggacgggcaggtctatctggacgagacagaggacagctactgcgtctggcggaccttctacgcccccggccggaagatctgcacctatcaggtggacctgttccggctgaacgccaacgggagctgggaccgggcctttgaggagcaccgggagcgggcctgggggcgggaggagctggagacgtatctgacggaggcgggcttcggcgctgtcaccgtcaccggcgacctcaccagccgtccaccggcggcggaggaggaccgctggattttccggtgtcaaaagccggtcagaccaagataaaacaggagtttgtacaatgagcgatcagttgatccgggccatctccaaggatggccatatcaaggccacggcagtttccacccgggcgctcacagagcgcgcccgtcagatccacaaggctctgcctgtggccacggcggcgctgggccggacgctggctgcggtctccatgatgggcaacgccctgaaggaggacggggccagcgtgacgctgcagatcaagggcggaggcccgctgggaacgctgctggcggtgtccgataaccagggcaacgtccggggaacggtggacaatcctgtcgtggacctgcctctgcggcccgacggcaagctggatgtgggggccgctgtgggccatgagggtacgttgacggtgatccgggacctgaacatgaaggagccctatgtgggcagcgtgagcctgttgggcggcgaaatcgcagaggacctggcggcctatttcgtggagtccgaacagatccccacggcttgcggcctgggggtgctggtagaccgggaccagagcgtgctggccgccggcgggtatctgatccagctgctgcccggcgccggcgaggatgtcatcgccaaggtggagggcagcctgatggccgcagggccggtgacgggacttttgcggaatgatccggacccggaggctatgctgcggcacgctctgtcggatttcgacctggagatcctggagaggagccccatcgagtaccgctgctactgcagccgggacaggatggagcgggccctcatcagcctggggccggaggaacttcaggccatgatcgacgagcagggcagcgcggacctcacctgccgcttctgtgacaatgtgcagcacttctccagagcagatctggaggccatggtccgggggctccagaaaaaaatgtaaaaaaattaaatttccagttgacagaccgggcgtctttgagtataataacttttgccgtctgaaatgagcggcaatcggggagcatagctcagctggttagagcacctgccttacaagcagggggtcactggttcgagtccagttgttcccaccaaagttatacatggcccggtagttcagttggttagaacgctagcctgtcacgctagaggtcgacggttcgagcccgttccgggtcgccatctcccacgagatggagttccatctcgtgggtccccttggggttgcaattcccctcccgcgccgtgcggcgcggaaaagatttgcccagatagctcagttggtagagcaggggactgaaaatccccgtgtcgctggttcgattccggctctgggcaccacttgcgggcatagctcatctggtagagcgccaccttgccaaggtggaggtagcgagttcgagcctcgttgcccgctccactgagaatgcccacacaagatcgtgtgggcattctcagtggaaaagaaaatttaaaaaagcagtggacatttcggttcaaactgcatataataaaatagaagcaacggtgacatagccaagtggtaaggcaagggtctgcaaaaccctgattccccggttcaaatccgggtgtcacctccagaaaaacaaccacatcgaaaagatgtggttgtttttttgtctaaatgcattcatgggcgcaggggattggattccgcctgtgcccgcttttctttttcagcggaaccatccgcacggcggaaaggctctgccccgcaatcggaccgcaaagaatacggctccgctcgcctatgcgattcgattgcggggacgtgtgcctgcggatgctgctttgacgaaaatggatgggaagatggcggacttttttggggaaaaagatagctaaaacggcgaattctttacgaaaaatatacaagagcctgtgagaaaaacgtgctataatgagttcgaataaacagagatgtgggagaccagcccccgatccgccggcgcgccctccaggctgccgtacgggtctggggcgttttccctagaaggagtgtatatggcacatatcaattcggatattctgcgcctcggcgtggatgtggggtccaccaccgtcaaagcagtggccctggacccggctgacaacagcgtactgttcacccgctatcagcggcataacgcccatcaggcggataccgtccggcagctgctggaggaggcggccggtcactttcccggcatgcggttccgtatcggcgtgtgcgggtccggcggacggcccattgccgccgccctgggggcctgctatgtccaggaggtggtggccaacgcggcggcagtccgggccttgtatccggaggtccgcaccgcggtggaactgggcggacaggatgccaaggtgatcttcttccgctatgacgaggccagcggaaagctccagacctccgacatgcggatgaacggcagctgcgccggaggcaccggcgcgtttatcgatgagatcgccgcgctgctgaacgtgccggcggacgagttcgagcaactggctgcccgcgggaagaccgtttacagcatctccggccgctgcggcgtgtttgccaagacagacatccagcccttgctgatccagggggcggagcgggcggatatcgcgctttccaccttccacgccatcgccaagcagaccatcggcggcctgtcccagggactggagctgacggcccccatcatctttgagggcggcccgctgaccttcaaccccacgctggtgcgggtgtttgcggagcggctgaatctggaggaaagggatatcgttcgaccggaccacccggagaccatcgtggcccggggcaccgccatcgccatcgacgagctgttccccggacaggaggacgccatgaccctggcagaggccatggagcggctggacaaggccccggcccagaccgaagggccctccggcaccggcaggcccttctttgccagcgacgaggagcgggaggtctttctccgccgccaccgggcggagctgcgccagccggtggatgccgcggagcggaaggtcctgcgggggtacatcggcatcgactccggctctaccacctccaagttcgtctttatagacgagaacgagcaggtgacggacactttctacgccaacaaccagggggagccgctgaaggtggtccgggagggcctgctggccctggcggagaagtatgagaagctgggcatccagctggaggtgctgggcctgggcaccaccggctacggcgagcagatgctctctgctgcctttcacgccgactaccacacagtagagaccgtggcccacgcccggggctgccgccgcttcttcccggacgccacgtttctgctggacatcggcggccaggacatgaaggccatctggctgaaggacggcgtggtcacgaacatcatgctgaacgaggcatgctcctccggctgcggctcctttttggagaacttcgccgccaccctggggatgccggtggaccaggtggcggacgccgccttccgatctcaggcccctgccgagctgggcagccggtgcactgtgttcatgaacagcaccatcatcaacgagcagcgcaacggcaagcagcctgacgacctgatggcggggctgtgccgctccatcatcgagaacgtgtttacaaaggtggtccgcatcgccaacgtggcggagctgggggatcgggtagtggtccaggggggcaccttccggaacttcgccgtcctgcgggccctggaggagtatctgggccgggacgtgaccctggccccctatcccggcgagatgggcgctctgggtgcggctctcgcggtgaagcaggaggtggaggcccacggctacgccaacggccgctgctccgccttcatcggctttgacgcggtgaaaaacttccaatacacccgggagagcggtgtactctgcccccactgcaccaaccactgcagccggacgatcctgcatttcccggacggtggctgctatgtcaccggcaaccggtgcgaccggggcgccgttgtgatggaggcggcacctgcccataaggcccaggaagtgccggacctgttccggctgcggcaggagctgctgttcaagacatatccggtatcccccgtgcgggaggagcagagccagaccgtgggcctgccccgggtgctggagttctgggacagcatgcccttctggagtaccttcttccgggctctgggatatcgggtgaagttctcccatcccagcagccgcagacagtatgagagcggactgcagtacgtggcgtcggacaccatctgttttccggccaagctggtccacggccatgtgctggacctgtccaaacagggcgtagaccggattttcctgccctatatcctccacatgcccacagagaacaaaggggagaagagcccctacgtctgcccggtcatcatgggctactccatggtggtgcggaacttccagtcccccggggagcacttctccgtgggctttgagacgccggtgttccactggttcagcaagcaggaccggaagcggcagatctgccggtatgccgtggaacactgcggcgccacaaagcggcaggcggaggccgcttaccgtcaggcggagacggccatcctctctttccgccatcagctggtggaggagggaaagcgggtcatcgcggacaccggaaaggcgggcggtttcgccgtggtgctggcgggacggccctatcacacagaccccctcatcaaccacgacctgtccgggatgttcacccgtcggggcatcccggtgctgacggtggatagcctgcccggactggagaaggcggacctgcgccggtcccgtgtggagatcaccaatgacttccacgcccggatgctctccggcgccatggtgacagcggagcagccctgcctggagtacgtgcagatcgtcagctttggctgcggccatgatgccattttgtccgatgagatcatccgcctgctgggggagggcagcggcaagccgcccctgatcctgaaggtggatgagagcgaggccgccgggtctctcggcatccgggtccagtcctttattgagacggtacagctgcgccgctctgcccaggcggagcaggcggcctgccgcctgccggagccctacgcggtgaagtaccgcaaggaggaccggaagctgcggactgtgctggtgccaaatatctccgccccggtgtccactcttctcacggccttgatggaccgggagggtattcgggcggtgagcctgccggtgggcggcgtggagcagatccgggtggggaagaagtacacccacaatgacatctgcttcccctgtcagatggtcatcggcgagctgatcgacgccctgcagaagggaaactatccggaggactccgtggccgtgggcatggccaagctcagctgcgactgccggatggccaattacaccgcgattctgcgcaaggcgctggacagcgccggatttgaaaacgtccccatcctcaccacagaccctggcgacaccaagggtatccaccccggcgtgtccatgctgggggcccggtctgtgctgctggcggcgtgggccttctccatgctggacattctggaggagctgtgccggaagatccgcccctatgagacggcggcaggcgagacgaaccgcgtgttcagcgaatgtgtggagtggattgccgccgcatccaagcaggggctgggcaagatgatcggtgccttccggcgggccatcgaggcattccgggggctccgctatgaccgctcccgccgcaagccccgggtgctggtcaccggcgagctgctggtgaactttcatcccggcaccaacttccacgtggaggagtacctggaacgcaacgacatggaggtcatcctgccccgcatcacctaccagttccgcaaggacttccaggcggccatcagcgagatccgggacttcggtgcccatctggcgccctatcccttcgccctggacggcgccgtggagttcatccagcggtttttggagcgcattgcccggtcccatcccctgtatcacccggcggcccggcctcaggacctgtacagtgacgtggagcacttcatccccaagaccctcacctgcggcgagggctggctgatggcgggcgagatcgcccactacgcccaccagggggtccggtccttcatcatcctccagccctttgggtgcctgcccaaccacgtgtgcggccggggcgtcaccaagcggctcaaggaggagttccccggcgtgcagatcctgcccctggacctggatccggacaccagctacgccaatgtggagaaccggctccagatgctcatcatgaatcagaccgcggaggcggagcattccgcagctagtgtggaaccggcaccccaaaagacccggggcggttcgccccgtccggcgctgtcctctacataagcgcgggcgtcggctgtattttcagactccggagaggaatgcccggtgccgaggttcgacctggatacaaagaaggcagccgttcatgcgaacggctgccttcttgaattttcggttatcgggaatctcgggcatttctggaggcgcggaccggtcggcggtcacttcgcacgtgcaggaggcgtgcgggcgcttctatggacagtggagagcagctcccgcacctgctcccgggagaggcggggcggaagcgtgctgtacaagctccgctccacatcgtccaccagaatgctgtaccgagcctgcatgggcgcatccaacgcgtcccggaggggcccccctgccagacgttccagatactcccggggggtctcctggctttgacggcggcagcggcggcgggcgccccagtgctccagttccaggagggcggcacggggggttccggcgtaccgcagcagaaatgccctgacccgcaggcgctggcccagccgggagagcaggccacggcggcccagacgctgcctgacgagcccgtcgtcatcatcctcctccggcaatctgatgcggctgcggctgcgccagagccagcgcaccagagcagccactccggccaggaccagcgcggccagggacaggagcagcaacgccgtcaccagctgaggggcgatggcggggccggaggcgctttccacaggcagagcggcctcactgccgcctccggcggcggaggacatccctgcggacccggcggagcggccctggaagagagacgtcaggaaccggaatacagcggtcagggcgccctccagaaggctgccgacggcctgaaagatggggatcagctcccccctggcggccagcagcagagcgcaggcggccacagccagcacggccaggaccgctgggaccagcagggccgggagccgcccgaagggagaaccggcccgaatggtgttgcgtccggaggtgcgcatccccaccactgccagcagatccagcgccagcagcgccaacagaaccggcacccggtccagcagctgaggggcgaaggaggccacgatcagatagaacagcccatacaggcccatgtactccccggccccgtggaggtggcggaccgtgacaggcgtgacgccccagtggtatccccggcacagggggaagaggtacaggggcacctgaatcaccagaagaggcggataggtcaggtccagcgtgcggctgagcagggggatccagacggcgcagagaagaacgttcagcagcagaatctgccaaaagcggcggggcttttggagaaagaggctgttgcctgcggtcatcagcccgccagagagcagaaacccccacatggagaagggcggccggccacacaggagctgccacagaatatcggccgtcaggaagacaatcagcagctcggtggccagcggcaggcacttgagggcggtggtctttccatgtctcataggccgcctcctgcccgaaaagcattcaggtccaggacccgcaggagggggtgagactgttcccccaggccagcagggggacgcggtgccgctccagcagcgcacaggtaccggcgtccaggcggcggacatccccgcagatcagaaaggcgccggagagggtgcggaggcgcggcaggatctcgtccgccgtaatggagacagcggtgtctgcggcggccagcagcgtcaggactgcgggaagctgcagccggtcccggcaggtggcaaactgctccagccgcccggcggggcgggagatgagcagagacacggccacctcctcttccatcagctgcgccgccagggagcccaggatctccagggcagattcgaagtcctccggcggcaggcccgcgaaggaggcaccgtccagcaggaacgcggcccggcggggggagattttctcgtagatgttcaccatggcgccctgcccccgggccatcaggcggaagttcagggaccgggcgttgtcccccggctggtaggcgcggacgttccggatcacggtccggtcatcctgaaagccccgggcgccggtctccagctcccagctgttgcgcaggaaccagcgggtggacacggggaccagccggggaaacaccgccagcgtcacgggcctgggcagcgggatttccttctcccggacgcagaggcacaggccgtcgccggagagcagccggatccggtcaaaggacagcaggccccggtgctccgcctggaggcggctggtgtaggacatccgctgatgccccagcaggaaggagacgttcttttcataatagggcttctgcacgcccccctccgggagttccacggtctcccagcggtgctccggccggagggcgccgcccggctccagggggaagcgcaccgtcagccagaccaggggcagccacttggggttgtccagcgtcacccgcagaggacagggctccccggggaagacgcagctccgctccgcctggagggcggcgttcacgccgtccagcacatggcgggcccagaggcgggccgcggcggccacggcggcggccgccagagagaagatggcggcgggcagccgcccgctcaggctgaagcccactccgcaggctgccagggccaggatggagaagcgccccgtgaacaggctggactcggcgaagtccactgcagcggactcaggcgttctggccatgggcaaggacctccccggtctcccggcagggcacctgggccagtacggtctccaccacgccggccgcctccaggccggagagcgccgcctgatgggacagcagtacccggtggggcaggacgtagcgggccagatacttcacatcgtccggggtgacatagtcccggccggagagggcggcataggctttggaggcccggaacaggtcccgggacacccgggggctggcgccgcaggccagctccggctgctcccgggtggcctggaccagctccacgatgtacgccaccaccggatcggacaggcggacctgccggatctcccgggtgaaccgattgacttcctccggggagagcagggggcggaggtccgcaaaggcggctccatctcccacggttcggagcatggcggcctcctccctgggggtggggtagcccatggagagcttgaagaggaagcggtccagctgggcagcgggcagggcgaaggtggtctccgtctccacggggttctgggtggccaggaccatgaagggtggggccaggggataggtgacgccgtctacggacacctgccgttcctccatggcctccagcagggcggactgggtacgggggatggcccggttgatctcgtccgccagcaggatgttggtcatgatggggccgggggtgaagaccatctccccggttttctggctgtaaatgttcatgcccacgatgtctgagggcagcagatccggggtgaactgcacccgcaccatgccgcagcccagcaccgcggagagggccttcaccagcgtggtcttgcccacgccggggatatcgtcaatcagcacgtgcccgccggcaaacaggctggtgagtaccaggcggatctgctcacccttgccgatgatggccttgccgcactctgtctcgatctgctccgccaaatggcggagttccgtgaagtccatagtcgtgcctcccaggttccatgaaatacccctctattatatctaacccgaaagcggaccgcaagagcggatgccagctccgggaagacctgaaaaaatgcgtgaaaaggagggaaccctctggaaaagcggaagcgcctgtgctatgatacgaaacagaaggtcccgcaacaggaccgacgagaatttgggaggaatgcgtatgaagaagacattgtccctgctcctgtccctggtgctgatgctcagcctggcgctgcccgcatccgctgcggagacggagtaccccaccctggagggcggcgtaaccgagatccagaagtatggcaacatcgtcctggacatcgatccggcggacctgaaggacggcggctacacatacggcgacctgctgaccgtcaccgtcaacggcactgggtatgacatgcccctgtgcaccaactactccgatgtggacaccggcgcgctggtgctgcgggacagcgagggtgtgctgatcgccgccatcaacatgggggactttgcgaccagcaacggcctggccgccaaggtcaccgccgaggacggctcctacacctgggagttccccgagggccagtccctggagagcatcaccgtctccatctccatgaaggagcagggcggctactatgaccagtacctcatccaccagctgacccgcaccgacgagcgggcggactacgcctccgacgcggtgttcgccaacttccgcaacgtggctgtgggcgatctgggggagaacgcctttttccgcagcagcagccccgtgaacaacgagctgggccgcgcctcctatgccgatgacctggcagaggccggcggcatccaggcggtcatgaacctggcggattccaacgagctgatcgagggctacatcgccgccgagggcttcgactccccctactaccagtctctgtacgaggcggggaaggtgaaggccctgaacctgggcgtggacttcaccgctgccgacttcaagtccggcctggcggagggcctgcgcttcttcgcggagaatgaggggccctatctggtccactgcaccgagggcaaggaccgggccggctttgtctccgccctgctggagtgcctgatgggcgccacctatgacgaggttgtggcggactacatgaccacctatgtgaattactatcacctggaagaaggcggcgagcagtatgaggcggtgaagaacagcaacatcgtctccatcctcaccaacatcaccggcgctgcggagggcacggatctgaccactgtggatctggccgctgcggcagaggactatatgctggacgccggcctgaccgcagacgaggtgaccgccctgaaggcgaacctggctaaggactacacggtagagaccgaggctcccgcggaggagacgccggaggagcctgttccccaggcccagacctacaccgtggaggcgggagactgcctgtggaacatcgcctatgaggtgtacggcaccggcactcgctggactgtgatctacgaggccaaccgggataccatccgtgaccccggcatgatccacatcgggcaggtgctgaccatccccgctgcctgaaaatgcctgattcgtttttgaaaacagctcccggagcaatccgggagctgtttttttgcctttgtatgcgcttgcaaggattttacatagactttacagagtcctggtgtcggattttacttccggctgtttatactaagaccgtcccttgagcaacagacataggaaaaggagtaatcttcgatatgaaaaaagtattttcgctcttgctgtccctgaccatggtcatggctctgctggccggctgcggcggtgacaccacggctgacgacaccacggatgataccgcttccaacgacgccgcccaggaggagaccgctgagctgagcggcactgtggccaccgacggctccacctccatggaggaggtcatcggcgccctgggtgagcagtttatggccgacaactccggcgtgtccgtcacctacaaccccaccggttctggcgccggcatcgaggccgtgtccaacggcagctgcgacatcggcctggcctcccgcgcactgaccgatgacgagaaggcgggcggcttgactgagaccatcgtggccctggacggcatcgccgtgatcgtcaacgctgagaaccccgtctccgacctgaccctggagcagatcgcctccatctacaccggcgctgtcaccgattggtctgagttcggcagcgacgccggcgccatcgccgtgatcggccgtgagtccggctccggtacccgtgacggcttcgagtctatcaccggcactgaggaccagtgcgtgctggcccaggagctgagctctaccggcgccgtgatcgaggcggttcgtaccacccccggcgccatcggctatgcctccctctccgccgtgcaggatcagaagggcatcacggtcctgactgtgggcggcgtggctccctctgaggccacggtcctggacggcagctatgccattcagcgtcccttcgtgttcgccacccgcaccgatgaggccctgtcggacgcggcccaggccttcttcgacttcgccacctccaccgccgccagcgacctgatcgccaacgccggcgccgtgcccgtggcccagtaagacaacgcttgttttccaccctcatatatacggtcagccgccgtgcccaccactggggcggcggccgttccgctgaaatctggacggacgccttgtccgggaacaaaggagaaccttatggaacatgaaatcgcggggcaggctgtgaaggccgccatggacggcgcgctggtcggcaccgccgacaggaaaaaggagcccatgaccgggaaaaaagccctgaaggccatggagcgggtgatgaatgccctcttctttatctgcggcatggtggctgtggcgttcgtgctcctcatcagcatctaccttatcatctcgggcctgccggccattctggagatcgggcccatcaacttcctgttcgggacccgctggtatgcctctaccggagacttcggcatcttcgccatcatcctcacctccttcgcgggcacggcgggggccattctcgtgggggtgcccatcggcctgatgacggccattttcctgtccaaggtggcgccgcctaagtttgccgccgtagttcatgcggcagtggaactgctggccggcatcccctccgtggtgtacggcctggtgggtatgatcctgctggtgcccgccatccgggtggcctttgacctgccctccggcgccacgctcctggcggctatcatcgtgctggcggtgatgattctgccctctatcgtctccgtgtcggagacggcgctgcgcgccgtgccccgggagtatgaggaggcgtctctggccctgggggccacccatatcgagaccgtgttccgcgtcagcgtgcccgctgcccgcagcggcatcgccaccgccattgtgctgggcatcggccgggccatcggtgaggccatggccatcattatggtggcgggcaatgtggccaatatgccgggcctgctgacgccggtgcggtttttgaccaccgccattgcctcggagatgtcctacgcctccgtgggctccctccaccgcaatgccctgttctccatcggcctggtgctgttcctcttcatcatgctgatcaatgtgttcctcaacgtctttatcaagcggaaaaaggaggactgaccgaacatggaatctcataccctgtccccccggcgccagctgtacgacaagggcctgcgggtggtgctgtacttctgcggcttcctcacctgcgcgctgctggttctgatcatcggctatatcttctaccggggcgtcccattcatcagctgggagctgctgtctacccagtccagctatatcaacgacaccatcggtatcctgcccaatatcctcaacacgctctatatcatcctgctgtccatggtgatcgtgctgcccctgggcgtgggcgccgccatctatctgacggagtacgccaccaaccggcgtctggtggctgtcatcgagttcgccaccgagaccctcaccggcatcccctccatcatcttcggcctggtgggtatgctgttcttcatccagatgatgggattgaagaccggtgtgctggccggcggcctgaccctggtggtgatgatcctgcccaccatcgtccgcaccacccaggagagcctgaagaccgtgccggactcctaccgggagggcgccctggccatgggcgccggtaaatggcacatggtccgcactgtggtgctgcccaacgcggtggacggcatcgtcaccggctgcatcctggcggtgggccgcattgtgggcgagagcgcggcgctgctgtacaccgccggcttcggcctggtgctcaataactttgtgactgcgctggaatcctcctccgccacattgaccgtggccctgtatgtgtatgccagtgagcggggcgagacagacatcgccttcgccatcgccaccattttgatgctgctgacgctggtcatcaacctgtccgccaatctggtgggccggaagctgaagaaaaactgacgaggaggatacgaaatgtccaccatcattcaagtaaaggacctgaatctgtggtacggggcgcaccatgccctccacggtgtgaatatcgacattccggagcatgagatcaccgccctgatcggcccctccggctgcggaaagtccacctttctgaagaccctgaaccggatgaatgacctggtaccgggcatccgcattgagggggaggtcaactacgccgggcagaacatctacgcccccaatgtggacaccacctggctgcgcaagcagatcggcatggtgttccagaaggccaatcccttccctatgagcatctatgacaacgtggcctacggcccccggacccacggcatccgctcccgggccaagctggacgagatcgtggagaactctctccgctccgccgccatctgggacgaggtgaaggaccggctgaagaagagtgccctgggcctctccggcggccagcagcagcggctgtgcattgcccgtgccttggcagtggagccggagatcctgctgatggatgagtccaccagcgccctggaccccatctccacctccaagatcgaagaccttgcagtggaactgaaaagcaagtatactgtcatcatggtgacccacaatatgcagcaggccgcccgtgtctccgacaacacggcgtttttcctgctgggggatctggtggagttcggcaggacggagacactgttctccacccccacggacaagcgcacagaagactacatcaccggccggttcggctaaggagggacgtaaggtgagaaacagatttggcgagcagctggagcggctgcacgtggaaatgatccagatgggcgccctgtgtgaggatgccatctctgccgcggcccaggccctgatgaagggtgacgaggacctggcacgcgccgccggggaggcggagcgggagatcgaccagaaggagcgggaggtggagaacctctgcctgaagctgctgctgcagcagcagcccgtggcacgggacctgcgggagatctcctctgcgctgaagatgatttccgatctggaacggatcggggaccaggcggcggacatcgcggagctgacccggttcgtgcgtctgccggacggccccggccgccagcggatcgaggagatgtccaaggccgtcatccggatggtgacagacagtgtggactcctttgtaaagcgggatctggagctggcccgggaggtctgccgggaagacgaccaggtggacgacctgttcaaccaggtgaaaaaggagctgatcgggctgatcgccgcagacgccgactccggcgagctgtggctggatctcatcatggtggccaagtatctggagcggatcggcgatcacgccaccaacgtggcggagtgggtggagtactccattacggggaatcacccctccaacaactgagcggcctgcgcacaggcgcggcgccgatattgaaaagggggaggggccatgcttacctatgaggatgtgaaaaacaattctgcggtccggacctatatccagagggcggacgagtctctgaccgctctgggctatacggagcacagctttgcccacgtgacggcggtggcggaaaacgccgcctatatcctctccaccctggggtatccggagcggacggtggagctggcaaagatcgccgggtttcttcacgacatcggcaacctggtgaaccgggtggatcactcccagtccggtgcggtcatggccttccgcattctggacaacatggattgtcctccggaggagatcgccaccatcgtcaccgccatcggcaaccacgacgagggcaccggcatgccggtgaacgccgtggcggcggcactgatcctggcggacaagtccgacgtccgccgcagccgggtccggaatccggatatggccagcttcgacatccatgaccgggtgaactactcggtgaagaagtccgtcctgaagatcaacgaggagcacacgctcatcaagctgaagctgtccgtggacacgaagtacggctctgtcatggactattttgagatcttcatgggccggatgctcctctgtcgaaaggcagcggagaagctgggcctgcagttcaagctgatgattaacgagcagcagctgatctgaccggccgccggagggagacaccctccgtccctccagcggggcggagagattgaatggggagggatatctgtgatctatctgctggaggatgacgacagtatccgggattttgtgatctatacattgaacagccagggtatggaggccaggggctttccgctgccctccctgttctggcaggccgtgggagagcagatgcctgccctggtgctgctggatatcatgctgccggaggaggatggactcagcgtcctgaaaaagctccgggccacgccccgcacggccaagctgccggtcatcatgctgacggccaagggcacggagtacgacaaggtggtgggtctggacggcggcgccgatgactatgtggccaagcccttcggcatgatggagctgctctcccgcatccgggcgctgctgcggcggacggagacggagaacggcaccctccgctgcggcattctggaggtggatccggggcagcacatcgtccgggtccggggacaggagaccatcctgacccagaaggagtttgaagtgctgtgcctgctgctgcgcaaccccggccaggtgctttcccgggagcagctgatcgagaacgtctggggctacgcctttaccggcgagagccggaccgtggacgtccacgtgcggaccctccgccagaagctgggagaggcgggcgtttacatcgagacggtccggggctatggctacaagatcagccctgtgaactgacaggagggctggagagacatgacgaaacggatctttcgctccatcctgggcgtgtccctggcagtgctgctggccagcctggtgctgatcgtgggcgtgctccacggttatttccaggatcgggtctccggtgagctggagagtctggcagagtacatcgcccatggggtagaggagaatggcacggactatctcacagaggatctgcccggcagctaccggattacctgggtggatgcggacggcaccgtgctcttcgacaaccggcaggacccggaggagatggggaaccacgcccagcgggaggagatccgggaggcgctgatcctggggaagggacatgcggtccgctattcggacacgctttcccagcagacgctgtatgcggcccagcggcttgctgacggaacggtgctgcgggtgtccagcgcccagtattccgtctgggtcctggtactgcaggcgctgcagccggtggcgctgatgatgctgctggccttcatcctggccatggcgctggcttcccgggtggcgcggcagctggtggagcccatcaacgccatcgacctcaatgaccccgccggcagcgagacctatgaggagctgacgcccctgctgtccaagctccgcagccagcagaggcagatccagcggcagatgcgggatttaaagcgccggcaggaggagttcaccgccatcacggagaacatgagcgagggcttcctggtgatcgaccaggagacgcgggtgctgacttacaattccgccgtgctgcggctgctctacgcgcaggtccccacagaggagggagagagcgtctacgccctgaaccgggaggcgggcttccgccgctgcgtggaggaggctctggccggtcggcggtgtgagcagctgctggaaaaggacgatgattgccgccagatcatcgccagtcctgtggaacaggacggccagatcgcgggtgcggtgctggtgatcctggatgtgacggagaaggagcagcgggagcggctgcggcgggagttcaccgccaacgtctcccacgagctgaagacgcccttgacctccatcctgggtacggcggagatcctgcagaacggtttggtgaagccggaggacgtcccccacttcgccgggaacatccaccgggagacggagcggctcatcgggctggtgaacgacatcatcaagctgtcccgcctggacgagggcggcggcctgggccagtgggagaccgtggatctgtacgaggaggcgcgagccgtcctggagcagctggctccggcggcccagcggaaacaggtgaccacccggctccagggcggcgaggctctggtgcggggcgtaccccagatcgtggaggagatcgtctacaacctctgcgacaacgccatcgcctacaaccgggcgaacggcagcgtcaccgtcacggtggaaaataccgccttcggcccccggatcacggtggcggacaccggcatcggcattccccgggaggcccagggccgggtattcgagcggttttaccgggtggacaagagccattcctccggcggcacgggactggggctctccatcgtcaagcacggggcggcctatctgggtgcccaggtggagctccacagcgaaccgggccacggcagcacctttacgcttacctttccgaaggcgggagcatgagggggggcttgcaatcccggcggaagtgtgctaggataaccggagattgatgaatgattggaggggtgtgaagatgcggatctgaccttcgtgttttggcatagagggttgctgcggcgaagacgcagcgtctttttccatgccattgcagggaaggcagaccgctgatctcacccaggtatcgcacagccccggatgcggggtgaatgccgtatgcccggccgcgggagaggtctgctctcccgcggccgttttttgctgcgcaaaagcacggcgaatcggaaatgacggatgagacgctcatgtgcgcggcatttgccgaagtctgcggtgcgccagaccgcacatgagggtctgcgcaaaggaggaatgcgatatgtccatgatcgacgtctcgaatctgacatttggatacgagggcagtccggagctcatctttgaccatgtgggctttcagatcgatagcggctggaaattgggctttaccgggcggaacggccggggaaagaccaccttcctgcggctgctccagggggagtacccgtacagcggcaccatctccgcctctgtggaatttgagtacttcccctacgaggtggcgaacctgtcccggacgggcctggaggtggtgcgggagatcgcgccggaggcggaggactgggagatccagcgggagctggggcttctggacctggcagagagatcactggagctgcccttttccagcctctccaacggggagcggaccaaggtgctgctggcggccatgtttttgaaggagaatgccttcttgctgatcgacgagcccaccaaccatctggacctggagggacggcggaagctggggagctatctggcccggaagcggggatttctgctggtatcccatgaccgggcgttcctggaccagtgtgtggaccatattctggccatcaaccggaccaatattgagatccagcgggggaatttctcctcctggtgggagaaccgccggaggcaggacgcctttgaactggcccggcaggagaagctgcagaaggacatcgggcggctgacggagtccgcccgccgtgcctccggctggtcggaccggacggagaagagcaagttcggtgtggacaagaccggggccaaggcagcggaccggggctttgtgggccacaaggcggccaagctgatgcagcggtccaaatccatccagcgccgccgggaggaggcagtggaggagaagaagcagctgctgcagaacctggagcggcaggaggcgctggcggttacgcccctgccctgccggacgggtgcgcggctggcggagttccgggacgtagccgtgtgctacaacggtcgcagggtctgccgggagatcaccttcgaggtgctggcgggggagcggatcgccctccagggcgcaaacggctgcggcaagtccagcctgctgaagctgctgctgggggaagagatcccccacagcggcacggtggagaccatgagcggcctggtggtgtcctatgtcagccagaatacggaccacctgcggggcagcctgacggagtttgtccggacccagggtctggacggcagccggttccggaccatcctgcggaagctggatgttccacgggagcagtttgagaaggacctggcagattacagcagcggccagaagaaaaaggtgctgctggccgcaagcctctgcacacaggcacacctgtacgtgtgggatgagccgctgaactttatcgacgtcatctcccggatgcaggtggaggatctgctgctggcctgtcggccgaccctgctgttcgtggagcacgacgcccgcttctgcgacgagatcgccacccggcgcatccggatccagagggaatgactcgaaacaagaagacgccctccgcagttgtgcggagggcgtccgttttcctttgtgattaccagaggtcgggccagaatacctggccgtcctccgaccggaagggctcgggcaccgtgtcctcttccagcatccgggcccggatggcggcggagaggtcctccactgtgccggggccgtagtcggcaaaggacgccgagtccatcaaaatggcgcccgcccgggccatgtcctccagattcacccgctggatctcctcggtatgggaggagcagcagtccgtcagcaccacggtgttgtactccagagcgatggcgtcatagcaggtggtgcggatgcagttgggggtggtggtgccggtgaggatcaccgtccgcacgtccagccgccggaggatcaggtccagctccgtctggaaaaaggcgctccacctgggcttgatgatggtgtagtccccgggctgggggcgcaggccctccggtgcctgggcgctgttgggaccggtggaggcggggcggcaggcccggccgccagcgacccagccggggtaacgggtcagctccacatcgctgccgtcagcgcggtagagccgcttgacaaagaataccggaatgcccttggcccgggccagctccacggcccggacgcagttggggaccatggactgggcgaagcggatccagtgtccgccctccggatgaacaaagccgttttccatatcgatgaccagcagggcggagcgggtgggattgggtttcatcagcagaacctcctgtcagagtttttgaaaaatatggatgcgaaaggagatacgggtggtgagagactccaggtccgccagacgctttgcacctgtcttgggggtcttccagtaatagggcgtcatctggaacagggcgcggatgtctgcctggcaggggagggtgatggtgccctccaccggcacgatggactgataggcgaacccctcatagggggtctccttttcctcattgggatagggacggtcgtagaggacctgcttcagctcccagaggtggtccggtccgggcaccacgtagaggaagtgcccgcccggcctcagcactcgccggaattcctccagcgccaggggggagaagcagtccagcagaatgtccgccgcgccgtccgccgccggcaggtggaaggaggaggccacagcccacgcaatgcctttctcccgcttggcggcggatcggagaatgggcttggaaatgtcggttcccgccatccggggggattttcccgcggcggccagggtccggaagatgccggaggtgtagaatccctcgccgcagcccacgtcccagatcaccggcgattcgccggaaagagacaaaatctgacaacagagcgtattgagaagcaggtcataataccccttggagaggaaatcccgccgtgcggcggccatatcccggtcatcccccggcgcggcggagtgcttttgattggggggcagcagataggtgtagccctcccgggcgatgtcataactgtgtccggccgggcagcgataggcccggtctccgcggtccagcggcgccccgcagacggggcagcggaaaagactttccatcacgtgtcctcgcccgtcacatcgttgatccacttccggctccgcagccgcaggataccccaggggcacttgcacacattttccgactggatgcataggcacaccaccgctaccggggcgttgaacaccagggcagtcaggaaggtcagaggtacagcgatgacccactggcagctcaggtcgatgatggaggccatgcgggagtcgccgcccgcccgaagcaggccggtgatgttggtgatgtcaaaggccttcagcggcagcatgaagagatatacgacgcacatggtgacggcgatctccagcgccagcccctccaaatggaacagaggatagagataggggatgaacaccgtaggcaggaggaccgccaggcacaccgacaccacgagacccactccgaaggagaccgtcagcaggcagcagcccagagagtagacctcctcccggccggcgccctcaccgatccgcttgcccacaatcacggcggtggcgcctgcgatgccgaagcaggccacagtggagaacttgtcgatgttgcccatgatggcgtgggccgccagcatatccgtgctgatggccatgtggcccatgacggcggtcataacgctgacgcccagaccccacagcacctcgttcaccagaacgggggtggcgtatttcaggaagctccgcgccatggccccgccgggccgcagcagcaggcggagcatcaggggcactcggcggtagcggggggcatagaccgcgacgatcacgaactccagcacccgggaggtcagggtggcaatggcagcaccggtgatccccagcgcaggcgcgccgaacttgccgaaaataagaatgtagttcaagcccgtgttggtcagcatggagatgccgaagacgatcatgcccatggcgggattctccgtgctgcgctgcatgccgatgtagacggagctgatggtgttgaagatatagctgaggccaacaatccggagatagggggcgcccaactcaatgagcaggtcgttgttggtcaccagagccatcacatggagggggaagaagaacagcacagcggccacggaaaccgcaatgatgagcccggcgtaaaggctgacgcccatacagcggttgatgctgtcggtgtcccccttgccccagtactggctggccaggacggagagtccgctgagcaggcccaggatgatgatctggagcaggtagatgggcgtgttggcggcagtgacagcggacagctcattctgccccagcatacccaccatgaaggtgtccacaaatcccagggaagtggtgatgagattctgcaggatcagcggcagagccagcaagaacagccgcttgtagaagccgggctcccgatgaagatgacgaaacataaaagacgaaacctcttgaaactgaaaagtaaaattgccttacagcatgggcatccgcgtgtcgtggtggcgccgcagggcgtccgcacaggcgtcgatgtcgcccttgtcagtctccgggccgaagctcaggcggatcaccccgccggagaccttcttggatagcttcaaggccgcgatcacgtgactgggcttgccctgatggcaggcggagccggcggagatgcagacgccctggctgcccaggtcattgacaatattttggctgggccagcccacgagagagatggagaggatatggggcgcgccgccgggagcggagaggattttcaagtcggggatggcagacagccgctctgcggcatagtcccggattttcgccatgcagaggagtttctcctccaaattttcccgccgcagctccacagccctggcaaagcccgcgatctgggccgtggcttcggtgccggcccggaggccgccctcctgcccgccgccggccagcagcggctttggattccggacccggggaccgatgtacagagcgccgatgcccttgggcccgccgatcttgtgggcggagatggtgaggaagtccgcccccagcgtttttgcggagcatgggaccttcaaaaagccttggaccgcgtcggtgtgcagcaacgtctgtgggttcttcaccgccaggccccgggcgatctcagcgatgggatagatgtttcccagctcgttgttcaccagcatgcaggacaccagcgccgtgtcctgccggacggcggcgaggacctgctccgcagagagggagccgtcctgagccgggacaagatacgtcacctcgtatccctgccgctccatccagcggcaggcttccagcacggcgctgtgctccactgcggtggtaacgatgtggcggcccaggtggcggttctgccagcaggcggcggtgacagcccagttgtccgcctccgtgccgcaggaggtgaagaacagctgcttggccccacagcccagtgcgtccgccacggtcttccgccagacttccacccggcgcttcatctccagccccatggggtactgggagctggggttgccgaactgttcggtgagcacctcatacatggcatccgccaccgcccggggaacgggcgtagtggcggcgtggtccagataaatcatgaaaaacgatctccttgcagttgggccttgcccaacagtaaaaattacagtataatcgaaacgcatcaagttattatataaaggttttgcggaaagtgcaaggagattccatgaaagttgccatctataccttgggctgcaaggtgaaccaatatgagactcaggccatggagcaggagctgctggcaagggggcacacgctcacggagttttccgatgaggcggatgcctatattgtgaacacctgctccgtcacggcagtcagcgaccagaagtcccggcaggtgatccacggcgtccagcggaagcaccccggcgccgtggtggcggtgtgcggctgctatccccagacccacgcggacgacgtgcggaagctgggggtggacctgatctccggcaccggcgaccggacgggttttatccgccttctggaagaggccgcggcggagaagcggcagatcgaggccatcgaccagccttttgagcggcgggtgttcgaggtcctgcccgccggcggcctggggggccgcacccgggccatgctgaaggtggaggacgggtgcgtcaacttctgtacctactgcatcattccatacgcccggggacgggtgcggtccctgcccgtccccactgccgtggagcagactcgggccctggcggcagagggctaccgggagatcgtggtgacgggcatcgagatctcctcctggggccaggacctgaagaacggagagaccctgatcgacctactggaggctgtctgcaccgccgcaccggctgtccgcatccggctggggagcctggagccccggaccatcacagaggagttctgccgccgggcggccgccctgccgaacctctgcccccagttccacttgtctatgcagtccggatgcgacgacaccctgaagcgaatgaaccggaaatacgataccactcgatatgcgcagtccgttgcacttttaaatcaatattttgaccaccccgctgtcaccacggacctcatcaccgggtttccggaggagacggaggaggaatttgcccagacgctggacttcatccgccggtgcggctttgcccagatgcacattttcccctactccgtccggcccggcaccccggcggccaagatgcgtcaggtgccgaaggccgtgaaggaagagcgggcccgccaggcggcggcggtggcggaggcgctccaccggaactatctcgcggcctgtgtgggagcggtgtatcccgtcctctttgaacagcccaaggacggcaggtatttcggccacgcacccaactatatggaggtgctggcggacgggacggacctgcataaccaggtgcggaatgtgaaagtcaccggcactgacggagcatccctgctgggtgagcttttggaggactgacatgaagagccatttctttgcctacatctcccggatgcggttcatccagcggtgggccctgatgcgcaacaccgcgccggagaacgtccaggagcacagtcatcaggtggccgtcctggcccacgctctggcggtgatccgcaacgagaagttcggcggccgcctggaccccggcgccgtggcggtggcggcgctgtaccatgacgccagcgagatcctgaccggcgacatgcccacccccatcaagtacgacaacccggccatccgaaacgcctacaaggacgtggaggcggtggcggagggcaagctgctccacatgctgccgccggagcttcagggggtgtacgggcccatcctgacgcagtccgacccggaggtgcggcaggtggtgaaggcggcggacaagctctccgcttatatcaagtgtgtagaggagctgaaagccggcaacaacgaattccggcaggccgccggccagacccggaaagccctggagggctacgaactgccggaagtgacgtactttctggagacctttatggacagcttctccctgaccctggacgagctgcagtgaacaaagaaccgccctggcgcacagcgccagggcggttctttgttcacttgttcagcttggagcagatcagcccgcccaggcggcggacaccctcctcgatcaggtcctccggcgtgttgccgaagctcatgcgcatacagttcttcccctggccgtcccggtcggagaagaagccctctcccgccacaaaagccacgttcacagccgggtctgtggaagactcctgcagcagggcggaggtgtcgatgccgccgggcagctccacccaggtgaagaggccgccgtccggattgctgtgcttggtaccggcggggaaataccggtcgatgctctggagcatcacgtcccggcgcctgcggtacaggtcgcagatcatctggtggtgggccgggtaacagccccgcttgaagaactccgcgcagaggatctggggcagcatggaggtgtgggagttggtggcggacttcacgtccaccagatgctggatggtctccgtatccgccaccacatagcccaggcgggagccgggggagaaaatcttggagaagctgcccgccatcaccacatggcctgtggtgtcgaagtgcttgatgggaggcaggtcctctccgctgtaccggatatcccgataggggtcgtcctccagcaccagcacgtcgtatttggcggccagctccgccacggccttccgccgctccaggctgagggtgcggccgctggggttctggaaggtgggaatgacatagatcatcttgggatggcactgccggatcttccgctccagatcctccgggatcaggccgttgtcatccatggccacacccacgcacctggcctcgaacatatcgaagatctccacggactggacgaaggtgggggcctccaccaggatcacgtcgccggggtcgatgtacgcctggcaggccaggttgatgccctccaggccgccggtgatgattatgacgttgtccacgccgcagtcgatgcccttgggagccagcagttcccggaccaccacctcccgcaggtcccggatcccctcaatggggccgtactgcagggcctccacgccccgggtgtccgtccgcagcacctcgtcggccagctggcggatggtgtccaccggcagggcctctctggcgggggaaccgccgctgaaggagatgatgtccgggttggtcatggacccgaacagtcctttgaccacattggccgtgaaggccattttttccatacgcttggcataaggcaccattctgcgctgtcctccatttcaagggcgcgcccttccggcgcgccgctgtgtgatttgatcgtttcagtataccacaccaggcgggaaaactcaattccccaaaaacaagccgtcccggggcaatgccccgggacgggaggatggtcattccaggggaatttggatgtctcccacctgcacggcggcgacctggctcacgtccagcagatgctggaaggagcaactgaaggacagagagaagggaagcgcctcgtcgggacggctgccggtgctgccgctgagtccgctccgggtcagctcctgtaccggcagggcattgccgtccgtcaggaccagggaggtggccgcccgcagatcttcgagaccctcataaacggtgttaccggtgagctgcacatggatggagaagggggacaggaccgtctggacaaagacaccgtcctgctggtaggaggccgtcagcgtctgggaggatcccgtcggctggaaagtcaccagggccggatggtctgtcacagcggtgtccacgccgtccacccgtaggacagggggcgtcagcagcaccgtcaccggctgggcggtgaagtcggcgctgccggatttcacggcgatatgaaagagataggtgagggtattggtctccatgtcatagccctggctctccgagccgccggagctgccgctggtgtagttgatcaggcggaaatccgccaaactgctcccagctctttccacgtagccgcaatatgaggtgtagtctgtccagtcgatgtccgcccacctgtcctggtcggcggccttcagctcctcccaggaaatgtcgccggtgagatagtaggagatatctggcaggtcgatacaatttgcctgccagtcctcgctttcataggccatctccacgagctcccggtccactgtgtccggcagccggtagtccagaatcagataaaggttcttctcggagaccagggcctcccggatggtcacggccacatcgtcgcagacggagatgacattcaccttctggaaggccttctccgccatgggggtttccgccgcgtcggggccaaagtagccggtgaaaatatcatcccagtccaccagcaccgctgcccccacggacagcgtcagtacaacagccagcaccgcagccagcagcgcctttcggaaaaatccccgggggcggtagacggcggtccgggcctgaggttccggctccgcggacaaaacagcctcccgcagctgttcctccagctccggcgggggcgcgcagtgttccattgactcgtgatagcgattcataagctctcctcccatgtgttccgcagggcgtcccggccccgcttcagccgcattttcaccgtgggcaccgtcacccccaggagccgcgcgatctcccggagggtgtagccctcgtagtagtggaggtgaaggactgtccgctgggactccggcagggcggccacgtggtccaacaggcccagctcctccggcgtgacggcggcggaggcggcctccagcggcagctcggaccggctggatcgcttccaggcgtcccgacactggttcagggccacccggaacagccatcgccgctcgtggtccggcgaggcaaagaccggcgcccggtacagccgcttgcagaacacctcctgcaagatatcctccgcatccgccgggttcttcatctggatcaggcagaatcggtacagggacggcccataggtccggtatacctgctcaaagagctgctccgcttcggtcactggcctcacctccttctgctgtgattacgagtgagcggggcaaaaggtcacaaagaactgcaaaaactccccggcttctgccggggagtttcagttcagggcatccgcctgctgtgtgaagagctccgtcacccgctctgccgtggcggggcaggaggtgagcgccgggtcctgtgccagcagctgctccgccgcctgacgggcctcctgcagcagctgggtgtcgcagcccagatccgccaccttcagccccggcaggccgtgctggcgcgctccgaagaagtcaccggggccccggagccgcaggtcctcctccgcgatctggaaaccgtcagtggtcttggtcatgaccttcagcctctgcctcgtctcctcgtttcggttgtcggagatcaggatgcagtaggactgatgcttcccccggcccacccggccccgcagctggtggagctgggagaggccgaaccgctccgcgttctcgatcaccatcaccgcggcgttgggcacatccacccccacctcgatgacggtggtggacaccaggatgtccgtctcatgggcagcgaaggcggccatgacggcgtccttctccttgggcttcatcttgccgtggacgaaggccaccttgagatccggaaacacctcggactggagctttttggcgtattccgtcaccgccttgcgctcgtcggggagctggtcattctcctctaccatgggacagacgatataggcctggcggccctcgcccaccagcttgcggatgaaacggtacacccgctggtgatagcccccggtgacggcgaaggtctgcaccggctggcggccggggggcagctggtcgatgatggacacgtccaggtctccgtagaggatcagggccagggtccgggggatgggggtagcggacatgaccagaatgtgggggtggtcccccttggcggccagttccgcccgctgggccacaccgaagcggtgctgctcatccgtcaccaccaggcccaggtcgcggtaggccacgctgccggtgatgagggcgtgggtgccgatggcaaagtcgatctccccgctctccagttgctgagtgatggaccgtttcgtcttggcggtggtggagccggtcagcagggcgcaccggatacccaaattttccagcagaggggccaggccctggtagtgctgctgggccaggatctccgtaggggccatcagggccgcctggcggccattcctcaccatgaagtacacgcaggcggcggccaccatggtctttccggaacccacgtctccctgacagagccggttcatgggcgtgccggagcgcatgtccgccagtgcttcctccacacagcggcgctgagcgtccgtcagggtgaagggcagggcacggtagaaaagctccatgtccacgccgccgcaagggggcacgtggaccacctcccggcgggagcggagccgctccagcccgatggtgaagaggaacagctcctcaaaggccagccgccgccgggccaggtccagggcctccgcgctctccgggaagtggatgttctcataggcgtactcgatgcggcagagctgatggtcccgccgcacacggtccggcagcacgtccggcaggatgtccgcgcaggcgtccagcccctggcggatggaccgggacaaaatcagctggctgactccggcggtaaggggatagatgggcacgatgcggccggtgacctcccgccgcccctccggctccaccacaggattggccatctgatgccggaggagggagccctccgcccggccatagaagatataggtctctccctggtgcaggctgtttttcagccacgcctggttgaaaaaggtcacatccagggtgccggtgtcgtccaccgcccggagcttcaccagatccagccccttgcggatgtgggagatggtgggcggggacgccaccatggcggccacgccggcggtctcgccgggcaccaggtccgcaatgcgccgcagggcagagcggtcgtcgtaggcccggggaagtaagagatcaggtcccgcagggtggcgatgcccagcttgcccagggccttggcccgctgctccccgatgcccttgatgtaccgcacatctgtgttcaggtccgccatggaatcacctcccgccttgcaaattattggtctccattatataatggcgccggagaaaaaacaaggagatgggcgcatggtcacctggaagaagtgggcggcccgcggagtctgatgtgtgggtttgttcggcgggatgatcgcggctggaaccggcctgtggcccctgggacccattggatcagcagcagtgatgatggtgttgggggctggtcctgtggagcaggcgatatcagcggtgtttgtgtgcccctcctgcggcgcagagttatcgggacaggacttccgatcatccaggtggagtccggatgggactgatgcattgccgcagttgtggagcgatgcttcccgtagaggaatgccgcagaaaagagctataaaaaagagcccggaatcccgggcacttttttgtaacaaaactactgcccatgcgtcctatggcagagaggaggggaggccgtgccggattttgaggagatctatcagacgtatttcgccgacgtgtaccgctacatcctggccctcagccgggacgcccacacggcggaggaggtgacccaggagaccttcttccgggcattggcctccatcgaccagttccggggggactgccagctgcgggtgtggctgtgccagatcgcccggaaccagtacctctcgctgtgccgggagcgaaagcaccggggagagctggagcaggagccgggggacgacgggctggagtgcgactttgcggaccgggacgccgccaagcggctccaccggctgctccatgacctgccggaaccctacaaggaggtgttctccctgcggaccttcggggagctgccctttgcccagatcggggagctcttcggcaagacggagtcctgggtccgggtcacctacttccgggcccgccagaaattgaaggagggatttgatggaccagctggaccatgatatcgtacaggacctgctgcccctgtaccacgacggcgtctgctcggacaagagccgggcggcggtggaagaacatctgaagacctgtgaggactgccgggccgccctaacggctatggacgcgcccctgccggaggtggaaaaggccgccgatgacgcggcggtagcagtgaaaaaaatatccggtgagtggaagaggggcaagcgccgggcccatatcattggcgtgattgttgccgtggtggtatgcgcggccgccgcagtggggatttggaccctcactacatggacgtgcatccccatggatggcggggactatacgctggatgtttaccggctgaggagcggaggcgtgggggtccactgggattttcgggagggccgggagacctggtatgccctgacattccgggaggaggcggacggacttcactactatctggagcggcccattctccgggtggagttgtttgactttgacagcaactataaccggggcggggacgccatgtttgaaagctggtcggatgatgccatggagaccgaagcgatctacttcggcttgggtgaggatgccgtcttgctgtggaaagagggcgaggaagtggacttgcccgccgccaccgccgcccaggaggagatgtgggcgattgcggaactgccaccgcaggaggtgccgcaggaatgagaaaagatgtcattccagtggaagatgcacagggcgggccgcgcagcccgcggcgtttcctccgtcttctggccctgctcctcgccgccttcgccctgctctccgctgtgtggtatttcacagcctaccggccctatgatgtttacatggaggccctgcgggcccagcccgggtggcgggaggctccggccctcccggggtgcggcacggatggggagggttacaactgtaatgtggcccggcctggatttctccattggacggggaatctggggattggcatgccgaacctgacgctggaaaacggggaggaggtgggcttcacagattccctcctgatctggccccggatgaccggcgagccggaactgggcgtccttctctttgagtatgactttcaggaggacggcgtcacctgtgccggccaccagctctacattacggcggcgggagagtaccgcccctatggagatgcggcggaggacgcggccaatgcgcagctgctggcggagcaccaggagaacgtggagacgttgctgtcccgggcccgggagatctggggcctgccgtgactcacaggccatggagcaaaaaccaggcggcccgccgggatctcccggcgggccgctgctcaatcgcacagcttcgtattcacatagtcatagaaccgataggtgagcccgttctccgtcaccggctcgctgacggctcttacagtccagccgggcagcttgtccagattgggaaagaaggagtccgcgccctccgcggcggcgtccacccgggtcacgtaagcccgtgcacattgggagagcagagcggcgtagatgctgccgccgccgatgacccacagctggtccggcggggtaccggctgtggcctcccgcatggccgccagactggagacggtctccgctccctcccgggaaaagtccgggcagtgggtgatgacgatgttccgccgcttgggcaggggccgcccgccgggaaaggagtccagcgtccggcggcccaggatgaccgtgccccccagggtgagggagcgaaagcgcttcatgtccgtaggcagggagaagagcagatcattgtcccggccgatggcccagttttgatcgacgacgacgatggcattcacagcgcaggcctcctcaaatagcgatggggatctggtcctcgaaggggcggggatgtagtcctccagggagaagctgtcccgggtaaaggcgtagaagtccgtcacggacgggtccatccggaacaccggcgccggggacggcgtctgggccagcatcttttcaatgatgggcacatggcggtcgtagatatgggcgtccgcgatcacgtggaccagttcgccgggcaccaggccgctgacctgggccagcatgtggaccagcaccgcgtactgcactacattccagttgttggcggccagcatgtcctggctccgctggttcaaaatggcgttgaggacattcccggagacgttgaaggtcatggaccaggcgcaggggtacagattcatctcatggagatcctggtggttgtagagactggtgaggatgcggcgggaggcggggttgtgcttcaggtcgtacagcacccggtccacctggtccatctccccttcgggatactggtgcttgatggagagctgatagccataggccttgccgatggagccgtccggatccgcccactcatcccagatgtggccgttcaggtcgtggatgttgttggacttcttctgccagatccacagcagttcgtccaccgcggtcttccagtaggtccggcggagggtcaggatggggaactcctcctgaaggtcatagcggttgacgatcccgaattttttcacagtgtgggcgggagtaccgtcctcccaatggggacggacgggcaggtctgtgtcccagaccccgtggtccagaatgtcccggcagttttgcagaaagagcgcatcggcacggctcatgggggtccctcctcagcgttgggtatttttttcagtatagcaaatccgggagaaaaacacaatcggcagatgaagccccggccgccaaattgggggcgtcttttcctgtgcctgttgtgaaaatcggctatgtgtggtagaatacctgcaaaacgggccctgcctcatcgggcgcggcgcccggttccacggccgaagagtgacccggcggatgctccggcgggcggaaaaggaggcgggagatgccggaccggaaggagatcaacaagcggggctatctaaaggaggacttccggctgttccacctgaaggacagccgggcccagaaggtggactatcactaccacgcctttgacaagctgatccttctcctgggggaaaggtcacctatgtggtggagggcgtcacctacttccttcagccctgggacctgctgctggtgggacacgacctgatccaccggcccatcatcgacccggcggagccctatgagcgggtggtgatctggctgggacgggagtggctggagcggcgcagcgaccccggcgaggcgctggacacctgcttcgacaccacccgggagcgggggttccacctgctgcgcttcgacgcagagcggcggctccactatatgcagcgcatccagcagctggaggaggccctgcgggaccggagcttcggcgccgcccgcatggcggataccctctgccagcagatgctgatcgacgtgaaccgggatgtgctgcgctcccgcaccgcccaggaggagcgggacagctaccgggtggaccccaagatggaggaggtgctccggtacattctggaccatctgggagaggagctgacggtggagtccctctccaagcggtttttcatcagccggtactatctgatgcaccggttcaaggccgtcaccggctacacggtccaccagtacatcagccagaagcggctgctgcgggccggggagctgatccgcgccggcgtgccggtgatgaaggcggcggagcaggccggatttgaggagtattccaccttcctgcgggccttccgcggcaccttccacatgagtccccgggagttccggtgacgaggatacggcaaaagcccgcccggggatcgctccccgggcgggcttgctgttactgggcctcgccggctgccaggcggaggatagcctccatgtccgcgggctggatcttcacgaagccgccgaaggggaagccgccgggcttctccgcccggtgggccaccatgtccgggatgtctttggccttggctcccagctcgtcaaaggtgatgggcatccccagggagtggaagaagaggcacagcttctcgatgccctggcgggcggtggcctccgggtccgcaaagttcatctcacagccgaagacccgcacggcgaactgggccagccggacgggatcatggggcagcacgtactccatccaggcgggcaggatcaccgcaagacccgcgccgtgggcgcagtcgtagaaggcggagagctcatgctcgatctggtggctggcccagtcctgctcccggcccacgccgcaggagttgttgtgggccagcatccctgcccacatcaggtccgcccgggcggcgtagtcattgggatcggcaatggccttgggggccgcgtccagcacggtcttcagcagggcctcgcacagccggtccgtcagccccacgtcgggagtgttggtgaagtaccgctccatgatgtgggccatcatgtccaccgcgccgctggcggtctggtaggcaggcagggaacaggtgaaccgggggttcagcacggcgaatttcgggcggatgacatccgtcttggggcaaccccacttcaggttgccccgctcctgggtgatgacgcagctgtcggacccctcgctgccggcggcggagatagtcagcaccacgcccacgggcagcgtcttctcgatcttggcggcgccggtgaagaaatcccagaaatcccccttgtacagcgcgccgaagccgatggccttggcggtgtcgatgacactgccgccgcccagtgccagcaggaagtccgcgccggtccgccggaccaggtcgatgccctcgtataccttgccgctgcgggggttggcctggacgccggagagctctgtaaaggggatgcccgcggcctccagggaggcggtgacggcgtcataggcgccgttgcggcggacggacccgccgccggtgaccagcagtacccggctgccgccgaaccggcgcaccagcgcgccggtgttttctcttctccatcgccgaaggtgaagagggtgggggagtagaaggtgaagttgttcatggatgaagttcctttccttaaaaattcaacaacataatcagtcccgcttggatagaagcacctcaaataccagcagggccagagctatcgccagcaggagaagccccgctgagagaacggccccgcaccaggtgctgcgcagagcagtgccgaagcggccgaaatcggtgtaccactggtctgcggtcagtgcatgatagacagctccggtcagccctgtcaaggcggctgctgttcctgcgaaggccagaggcggagagatcacccggagactccaccgccacagtggaagagacaggaagtcggacgcatcatcagccttggcattctcccccagcagttcatcggcggagatgccgaagacgcggcacaattggagaagcttttccgcatcaggaaggacctcgccgctctcccagcggctgacgtcctgcgtggagacgcccagccgctctgccagaatctcctgagagaggtgggcagccagccgcctctgggtgattttttcgccgatggtcatgggaaaactcctttcgcaaatagctttcgtatatcactggcctgccccggcggactgcttaatatccccggttccggtccaccagtcccgccagcgggcgcccggcggcgtagttctccagatcggcacagaagcgggctacgttttcgtcgcaggtgtagcccagggtcatgttgccggagacgtgggggtgagaatgatgttccgggcgtcccacagaggatcgtcctggggcagaggctccgggtccatcacgtccagggcggcgcctgccagctttccgctgttcagggcctccgccagggccttctggtccagagcggtgccacggcccacgttgatgacgcaggcgtcggcgggcagcagggcgatccgctcccggttcaggatgtgaacggtctccggcgtgctgggcagggccatcaccaggatttttgtgcggggcagcacgtcgtccagagcggagatgggatacacctcgtcgaaggcggggtggggctttccgctgcggctgagacccacgatcttcgcggcccccatgccccgcagccggtccgccacatggcgtccgatatccccggtgcccaggatggtgaattcgttgtcccggatggagcggacgggcaactgattggaccagccgtggcctcggacgatttcgatgtactccggcatccgccgcagcagcatcagggtcaccatcaccacatgctcggcgatggtaacgccgtagacgttggagttggtcagcaggcagtccgggttggcgaacaggccagggtccttgcagtagaggtccaccccggcaaaggagcagcagtaccacttcagcgtagcgggagcggcgcgcagaaggtcagcggaatgggcgtacagaacctcgcagtgctggaggcagtccttcgcctcctcaaactggtccaggttgaagaaatggggggtgaagcccgtccggcgggcggtctcccggatccggtccttgtgggcttccgtgaggaattcctgatagatgcagatattgcgattcataaacaatcagactccttttgaatggattgacagagttgctcggcacagtgcatcccatccgcggcggcggagaggatgccgccggcatagccggctccctcgccgcaggggtacaggccccggagagaggactggcaggtcccatcccgtgggatgcgcacaggggaggaggaacggctctccaccgccgtcaggacggcgtccggatcgtcgtagccccggagcttctgccccagcagggggagcgccccggcaatggtatccgccacgaagggcggcaggcaccggcgcaggtccgtccaggtgacgccggggcggtagctggggtgcactcggcctgggccgacggaggggcgccccgccagaaagtcccccacccgctgggccggggcccggtagtccccacccccagagcgtaggctgcagactccagcttccgctggaaggcgatacccgccaggggatcttccgccccgccatagtcctctggcgtcacgttcaccagtaggccgccattgatattctccttgtcccgggcgaattcgctcatgccgttggtgaccacccgctccgcctcagaagcggccgccaccacctccccgccggggcagacgcagaaggagtaggccgcccggccgccgggcagatggcaggagagcttgtaggtagacaccggaagcccgggatgcccggcgtactgccggtattgggcggcgtcgcagtccgcctgccggtgttcgatccgcacccccacggcgaagggcttggcctccatgggcacaccccttttatggagcatggcgaaggtgtcccgggcggagtgccctgggcagaggagcaggtgggagcagggaagggtataaacgccctccggcccctccgcggtgatgccccgcagggcgccgtcccggatgtccagatccgccagccggctctcaaaccggatgtccgttcccagttccagcagacggcggcgcaggtttaccagaacggtgtggagataatccgtgcccacatggggtttggcatcgatcaaaatatcctccggagcgccgcaggataacaacgtctccaggataaagcggtggcgggggtcgcgtgtgccggtgttcagcttcccgtccgagaaggctcctgcgccgccctcgccgaattggacattggaggtcaggtccagctctcccgtggcccagaaccgttccacatccgccttccgccgctccaccgggcggccccgctccagcaggatggggcgcagccccgcctgggccagcaccagggcggcgaagagccccgcgggcccggcgcccaccaccacgggaggcaccgccggcgcaggcaggggagacggcggcgtgtacgccggggcctgtgcggcccggctgatcttccggctcctggctcggcggagaatagcggactcctccttgaccgcgacctccaccgtgtagaccaggcggacttcttcccgggcgtccacactgcggcggagtaagcgcagggagagaatgtccttctcccgcatccggagcagccgggcggcctcagcggccagctccgccatgccggcctccggcgggagcttgatggaatcgattcttaacaccttgttcaaagttcctttcagatgtgtttaagataagcatactatacttcagtcaaaggttcaaggaagagcccctgaaaagcttccggttttttccggagcgccgtccaggacaattcaaaaattggaatcagaaacttcatacttttgacacgatcccatgttatcctctgttctaaacaatggatgagcgggatacataataggaggcaatcattatgtataacgacgaacacaatctctatcactacacctaccggaaggacggcagcgaggcggaggcgcatccggctccccagcccggcccggtacaggaccataacagcgggccgcagcagcccgtgcaggagatgaagcctgtgaagaaaaaccgcattggactgaaggtgacggccctggccctgtgctgcgccctgctgggcggcgccgtgggcggcggcattgtctggggcgtcggcagaagcggcgacgagacctcggtcaacgtcagcggccgcaccgtcagtcaggtcgcactgaaaaccgtggacggcaagacggcgatgagcgacgcggaggtttacgccgccaatgtcaacagcgtggtgtctatcaatgtcaccgggaccaacagcaacaacttcttcggccagccggtacaaacggcatcctccggctccggcttcattctcaccacggatggctatattgtcaccaactaccatgtggtggaggacgcacagaccgtgaaggtcaccttgtataacggcgatgaatacaacgcccagtatgtgggcggcgatgaggactacgacatcgcggtcatcaagatcgaggcctccggcctgcaggccgtcaccctgggcgacagtgagaagctgaatgtgggcgaccgggttctggccattggcaaccccctgggggacctgacgttctccatgagcggcggcatggtctccagcgtgaaccgcaccatcaacgtggacggcacgcccttcaatatgatccagaccgatacctccatcaaccccggcaactccggcggcccgctgctgaacggctacggtgaggtggtgggtatcgtgtccgccaaatactccagctacggcagctccggcgagagtgtggagggcttgggcttcgctatccccatcaatgacgtcatcagcatgatccaggacatcatgaccaacggctatgtgagcaacaaggcctatctgggcgccaccatcggcaccctgaccagcggcatggcccagcagtaccgctatgatatcagccagggtgccttcgtatactctgtggaggacggcagtccggcggctgcggcgggcctgcagttgggcgacgttatcaccgccatcgacggcacggagatcacctccctggaggacctgaccgccgccaagaagggctatgcggccggcgatacctccacactgaccgtctaccgccagggtgagaccatcactctggagctgacctggggcgccgtgtctgccgatcagcagtccgctgtgcagggccagacggagcaggatcagaacacccagaacggcggcgggtacaccaatccttacgacctcttcgagtacttcttcggctgatggcgggagactcccgcagccagaaataactctgcggcccggtggcggctctgcggcagatgctgcggaagggcaaaaagccgccggatgcggcgggcggcggagatttcagatagaacgaaaagggcgcaccgcggaaccgcggtgcgcctttccagtatggaagcggcgtccatcgaaatggacgccgcttccgcactgaataaaaatgaagggagagatggaaagcagaatcatttggaggcaggctcctcctctttagcagactgcttgtttttgtgggccttgatggagctgttgatgcagcccagcgccaagacagcaacgattgcgagcatcacatagccgccgacttccatgagaggacacctccttcccgattcggattcgaggatttatttacgaaaagttgtcatgaatataaaaatattaacggattcttaacgacctcttaacgatatcttagcgccaatgagccaaaaaagcaagccccttttcggaaaaattttttgcgctttccgaaaggggctcagtccagaaaatatcccagggaggcaaagacctcagacagccgctgggggccagaatctcgatcctgcggtaagactggcggaggatgccggcctcccgaaactgtttgaggatgcgggtgacggagacacggctcataccggtgatggccgcgatctgctcgtgggtgtacggaatggagggaccggagctggcgcagcaggtgtgcaggaaataggccacccgcttgtcatcctccagaaagtgggaacagcagatatagtcggacagcatggtgatccgccgcacaaaatgggccatcaggtcctggggaggatagccgtgctcctgccacagcttccaaaagcggtctgccgccagcagatagacctccgccggagagatggcggacacgctgaccatgaccttggcgtgatacaccagggcgctgctgccgaacagattgccgggtcccaggtaaaagagggagatctcatctccgctgggaccgaggcagaaggtgcggagctgccccttgaccagaaagcctgcctgtgcggacagcgcacccttttccagcaggacctcgccgctgcggtactggcgtctgacgccgtatttgacaaaaagctcccccacgtgggggctgatctggatgtcgccggacacggggcatcccgcctcctttcctgagaggattccatatcaacatcaacaaaaatagtagcagattttctcccattccacaagatgcatttgtatcacctgttacaatctggccgccggctctccctttacaataagcatatcccgactgagcggctcggtcagaatgccgcgcggcgcggatcaaaaaggaggagctgacaatgaaggataccatgtgcggccttgtcaaggaggtcaacgccccgtccggcctggtctatcacactgacctgtcgatcccggagatcaatgacgatgaagtcctcatcaaggtccactgctcggccatctgcggcacggatctgcacatcatggaatgggacgagtggtcccagaagcggatcaaggcccccgttaccgtgggccatgagacagccggcgagatcgtggcggtgggaaaaaacgtcacggagcgcaaggtgggcgaccgggtgtcctgcgagtcccatattccctgcggcgagtgctatttctgcaagaacgggatgccacacatctgcaagaacgtgaagctgttcggctgcacccagaacggagccttcgccgaatacgccaagatccgctgggactgcacgttcctgttggaggatgacgtcaccgacgaggcggcctgcatgttcgagcccatgggcgctgggattcacggcgtggaggcggcggaggtcaacggaaagaccgtgctggtcagcggctgcggccccatcggtctgacagccatcagcgccagcaagaccttcggcgctgtcaaggtcatcgcctgcgacctgatcgatgagaagctggaggtggccaagaagatgggcgccgacgcggtgctcaacagcgccaagtgcgacctgccggcggaggtcaggactctgaccggcggcgtgggcgtggacgcggccatcgacatcaccggcgcggagcccgccctcaacagcgccctcaagtgcctgcgggctgcgggccgtctggtgtgcgtgggactgcccaccaagcccatcaccttccacgacatgaccgacgacctggtctatcgggaggtccagctgaccggcgtctccggacggaagatctgggagacctgggaggacttcgccaaggtcatgaagggaccctatttcaagctggatcaggtcatcggtggccgcttccccatgaaggactttgaggccgctctggcgcagatccacagcggcgtgcccggcaagatgatcctgtatccctgatcccgccccgcagaacaggcaggaggagactgtgcccattctgcggcggaccctgacccggcccggagatgctgaacgatcctgaaacacccccgccgcatcgcggcgggggtgttctgcgtcagtccggcagatggaagatatcctccacaggggttttcagcagccgggccagccgcatggccagccccagggtgggatcgtacttgttgttctcaatggcgttgatggtttggcgggtgacgcccagctcccgtgccaggtcctcctgccggagccccgccgccttccgcagctcccgaatccggttttccatagctcacagccccgcgcaccgcagcagcaggccgaaggccagcaggaagactaccagcagcgggacatacagcaggaagctcctggcgccgtcccggtccccggcgcgccatctccccacctgcagggccagaaaatacaggagattctgaaagatcaacaggtacatgggcgcggtgacgcggccggtctggacgcagtcccagatcccccatataaacagggccatcaccgtgaagaaccaggccacccggatggcgttcagggagaggtgaagttccatctcatccatgttccgaaagaatttcatagaactgcctccttgctttgaattgtcaagttcttttgacatttttagaatagtacggcagatgcgaaatgtcaatagtgttttacatttttgcaaagaggatagaaaaacgtcggggaacgcaggctgacccttgcacttttgggcctgaaatggtacaataattgtccgaaaatatcagcaagggagagcgctgcttttatgaaattaggaatcgtgggtctgcccaatgtgggcaaatcgaccctgttcaacgccatcaccaacgccggcgccgagagcgccaactatccgttctgcaccatcgaccccaacgtgggcatggtagcggtgccggacgagcggctggacaagctggcggagatgtatcagccggataagaagaccccggcggtcatcgaattcgtggacatcgccggactggtgaagggcgccagcaagggcgagggcctgggcaacaagttcctggccaacatccgggagaccgacgccatcgtccacgtggtccgctgctttgacgacgagaacgtcattcacgtggagggcagcacggaccccaggcgggacatcgacatcatcaacatggagctggtgatggcggacctggagatggtccagcgccgggtggagaaggccacgaaagccctgaagggcgacaagaagttccagcatgaggtggacgtgttcaccgcactgcagaagcatctggacgggggcaatctggcccggacctttgcctgtgacgaggacgacgcggccctgatcgccacctccgacctgctgaccctgaagcctgtgatctacgccgccaacaccgacgaggcgggcttcgccgatctggagcataaccagtactaccagcaggtgaaggccattgccgacgcggaggacagccaggtgctgcccatctgcgccaagatggagcaggacatcgccgagctggagggcgaggagaagctgatgtttctggaggagctgggagtggaggagtccggcctggaccggctcatcaagtgctcctacgctctgctgggcctgatctccttcctgacctacggcaaggacgagtgccgggcctggaccatcaagaagggcaccaaggccccccaagccgccggcaagatccactccgacatcgagcggggcttcatccgggcggaggtcatcgcatacgatgacatgatcgcctgcggcagcgtcaacgccgccaaggagaaagggctgctccgcagcgagggcaaggagtatgtggttcaggacggagacatggtctacttccggttcaacgtatgatgacggaggcggagagactggcggcctatgaccgcatgtacgccgacctgctgaaggaacgggacaaggtcctggcggacatggacaagctccgcgccgcgggaaggaatcggggaaccacctaccagcagctgttggcccagaagctgacggttcagaacctgatcggccggtttgagatctacggaatcaaagaagtgtgagggacaggcaggcgcaaatgcgcctgcctgttttgcctgcggagagggatctcctgacggcaggccggtcccatgggcaaaagggaccgggcgtctggcaggacagcattccatatagcgggcggccgtccgctgtccggcagaaaaattcccagggggaaacatttcggcccgccccggcgtatataggttgaaagcgcttttcaaacgagagaaaggaggcattgcatggaagaggctgaaatcctgctgcgcaatgccatggaacaccacggtgccgccgtctaccggctggccctgtgccggatgcagagcgtccaggacgcagaggacgtgtaccaggacgtgtttctccggctgctgggccaggaggcatctgcctgggacggggagcatctgcgggcctggctgctgcggtgcacggtgaaccggtgccatgacctgcaccgcttccgcctgcggcgtccggtgctggcgctggcggacctgccggagacggccgcggaagcggacagcggcgccgcagagctgtgggacgcagtggcccacctgccggaaaagctgcgcgtccccatccacctgtattatgccgagggatattccacggaggagatcgccgggctgctggacattccggcggccacagtccgcacccggctccgccgggcccgaaaaagactcaaagacctgctgggaggagacgaccatgaagaagaacgactatcagaatttgatggagcatatccagcccccgccgggctgaatgaccgggtgctgtccgccgcccggcagacggcgggagcgcagaaggagacgaccggccccaaacatctggcgcccggaaagcggcgcccggtgctccgggcggcagtatgcgccgcctgtgcactggcgctggtggtaggttctgtaacgctggggcccattggcggcggagagcccggagagagcggcgcgccggtaacagccctgcccagcttctccttcggcctgacggcttatgccgctgacacgggggagcgttacgaggcgaacgccaacggggggctggccttcagcacagccggtcaagtctcctggtctgccgagggcggccactacaccggctgtctgttccaggtgaccggggagaacattcgaaccatttcccttgccattgaccgagaggcgctgtaccgcagcagaactctgaccaacctctccagagaagaggtgcagaactatctcgatgccgaggccaacggcacggagtaccggctttccagcggcgaaggagtgatccatgccgtttatggcgaggaggaagaggggcccctgaccatggaggtggtgacggatctgggcgctgccgtcacggagggctatgacccggaggtgcgctatggattcctgattccggacaccggcgatatcgactgggacagggatccccgggtggcgaatcaggagagcatcgaccggatggacggcgctcggctgacggtgacggtgaccttcactgacggttcggagcagaccaagacctacacgctgtccacagggcggctgaaggtggaatatgacgcaaacagccccggcgggatcctcctgccccagctggccggtgatgaagacccgtggctctacggcgtctatgcggtggatgagacggccagccgtttcctccagtggccggtgcagggagccaacaccatcagcctctccaacccctatggtacccccggtggcagccgggcggcaagacctgtgaaactcacaccggaatcgacattgccgcgccggagggcgaggcagtcctggccgcagcgggcggcactgtggtggagtccggctatgacgtggagcgaggcaattatgtggtgatcgaccacggggacggcctttctaccctatatggccagtgccgggactttacggtggaggagggcgacaccgtccgggccggggagatgatcggtgccgtggggaagaccggcatggcaacaggggcccatctccactttgaggtccgccaggacggagagccccagaacccggtggcctattttgacagcgacgtgcgggacaccctccgcatgggctgaccggtcctctgtgaaaagaacagtgagcgcggcgcggaatttgttccgcgccgcgctcgttttcggctggggtcaggcccggggcctgcgggcagcccgtcgggcctccgcttttttctccaggttggagaccaccagggcgcaggcagcgtcgcccgtgatgttcaccgtggtgcggcccatgtcgaagatgcggtccacgccgatgaccaggccgatgcctgccaccggcagattcacgctctccagcaccatggtcagcatcaccacgccggagccggggacacccgcggttccgatggaggccagggtggcggtgagcacaatggtgatcatttggcccagggtcaggtccactccgtagcaggtggcgatgaacacggcgcacacgccctggtagatggcggtgccgtccatgttgatggtggcgcccaggggcaggacgaagctggcgatgtcccgccgggcgcccagccgctccgtgcactccaggttcaaaggcagggtgcccacggaggaggcagaggagaacgccatggccatggccgggaacatccccttgaagaaggccagcggactcacgccgcccagggcctttaccgtggcagagtagacgatgacggcgtggaggaagtacccgatataggcgcacagcagcaccaggcccagattgcccaggatctggggaccgttttccgccaccaccggcaggatcaggcagaacacgccgatgggggagaggcgcaggatgatgtccatgaccttcatgcagacctctgtaaggctgtcgaccagcgccgctgcgggccgtcccttctctccggcggccaggatgccgaagccgaacagcagcgccgccacgatcacctgcagcatggaggcgttggcaaagggggcgatgatgttggaggggaagatgtccaccagcgtgtccatgaagctggcggtctcaccgggctcaaaggtgacaccggtggggtcgatgaccgtgaagaagcccttgaacaggttggccaggaacatggccagcacgatggccccggcagtggtgcaggtataatacaccagcgttttgacgccgatggaacccaccttgcggatatcgctcatggagatgatgccggagagaatggagaaaaagacgatgggcaccaccacgaacttcagcaggttcaggaaaatggtgccgaagggcttgatatagctgacggcaaaggtgggatttcccgtgaaggccatgccgaccgcgatgcctagccccagcgccagaaagatttggagggagagaggaatttttttctgcttcatatacgcgctcctttgcttggtgaactgttgtgcagggccattcggcggaaagaccgcccgaaatggccgaaaactaatctagtatatcaaaaaaactgggacagcacaaccctcttttgcaacagagtgcccatttccgctgcttagaaacctgatttcaatttctgtttattttgtcaggaaggcggagggtatagatacgatcccggcatggatggcagagatggagaagagaacctggcatctccactgggcggcgtgggaaaagcggcggatccgggctcgaacattgacggcctgtaaaagagtcccccggacagaaaacgacctctcccgatccggagaggccgtttgttcagtcatgggcgtgaggcaggttccagcggaagtgggcggagaggatgcggacggcgaccacaagcgcactgccgcagagcatggcggccatctctcccgccaggggccagaggaccacgcaggccagcgccccggccagggaggcggaggcatagacatgcttgacgaaaatgtagggcgtgtccccggccagcacgtcccgcagcacgccgccgcccacgccggtaaccacgcccacaaacaccagcaggaacagggtggggcgggccgcgtgttcataggcaatgcggatgcccgccacagtgaaaatgccaaggcccgcggagtccataatcagcagcaccaagtcgtagagccgctggtcccacatgaggagccgccggatgcggggcagaaacagcaccagggaggtcagcagggccaccacggcgtagatgggatcctggaaggtgcccggcggcgtgatgcccaagagcaggtcccggatgacgccgccgcccaccgcggtggtgaggcccagaatgcagacgccgaaaacgtccatgttctttttcaggccggtgatggcgccggaggcggcaaaagcgagcgtcccaaccagctccaggatcagaaacagctgttccatggccgtcaccgggcgtcctgccggaccatctccataaaggcggaggccgcggcggtgggcgtcacgtcccgcagggtgcacatgtccacgctgcgggcaggaatggtgaagtcggttttcagcaggcggatgtccccgctgtccagggccttctgcacaaactccagcgtcacaccggccacccccaggccgatccgggccagggataccagaaggctccgggaggagagctcgatttccggcgtcagggtgatgccgctttgcagaaagtactgctccagaaacacccggctgctggccttgcgctccagcaggatcagggggaactccgcgatctcctgccgggtatacacgtggtcgaagtcacagtcgtagccgctgcccgccacaaagacggagtgggtggcgaagcaggaccaggtatgcagcgcggcggggtccgtgggggaggaggcgaaggcgatgtccacagcgccggatttcagcatgctcagcaccttggcgctgcggccgctgacaatcttcagccggatgcccgggtgctggcggtggaaggcctccaaatatggcgtcaggaaaaagctggtgacagtgtcgctggcgccgatagtcagggtgcccagcaacagctgctgggcctgggacagcttgtcctcccctgtggccagcaggcccagggcgctgcggacatactggtagagcatctgcccctcccaggtgagggagacgccccggggactgcgggcgaacaggcgggcctggagcgccgtctccagctgcttgatagactggctcaccgccgactgggagatgtagaggttttttgccgccagggagatgttgcccgtctccgccacctctttgaacactcggtacagctccagcttgaccgccatggatcatccctccagcaatcagaatttcttatagtgtccggaatcattataagggatgactggaggaaacgcaacggcggcggaaaaattttcggtttttctttgcaagcgggatggtttttggtatactaacacattagattgtaaagacgggaggcgcgctatgctgtatcacattctggcagtgggcgacgtggtgatggagcccggcctccgccatctggagcggcacctgcgtcccctccagaagtggaaggccatcgacttcacggtggtgaacggcgagaatgccgccggagtggggctgacccgcgaccaggcggagcggatctacgacgccggtgccgacgtggtgaccttggggaaccacgccttcggcaagagccagattgcggatttcctggaggacgcgccctggctgctgcggcccgccaactacaccggccgggccccgggtcggggctgcggtgtttacgacctgggcggcgtccggatccgggtgctgaacctgatcggccggtgcgacctggcctggggggcggacaaccccttcacggcggcggaccggctgctggagagagacgcggcggacttcaccctggtggacttccacgcggaggcaaccagtgagaaactggccatgggctactatctggacgggcgggtgtccgccctgtgggggacccatacccacgtgcccaccgctgacgagcgggtgtgtcccaggggcacgggctatattacggatttgggaatgaccgggtccatcgagtcggtgctgggcatcgacccccggcagtccgtggagggattcctgggcggcctgccgggccgctaccgggcgccggagggacccgccaagctccagggggccatcttcacgctggacagcgccaccggactgtgcaccgccgtggagcggatcgacgtacggtgaccgggacgatttcaaaccggctggttaaaatttcagatagagaggaacgaaccatcatgtccattgaaaaagtcagagcacatttcaagcccctcggcatcgaagagcgaatccgggagttcgatgtctcctccgccacggtggagctggcggcggtggccgtgggtgtggagggcgcccgcattgccaagagcctcagcttcaaggtggaggacaagcccatcatcattgtggtggcgggggacgccaaggtggacaacagccgctacaaggcccagttccacaccaaggccaaaatgctgacccatgaggaggcccacgagctgatcggccacgacgtgggcggcgtgtgcccctttgccctgccggaggatgtgaaggtgtacctggatgtgtccatgaagcggttcgagacggtgttccccgccgcaggcagcagcaacagcgccgtggagatgacctgcgacgagctggagcggtacgcctccaactttgccgcgtgggtggatgtgtgcaagggctggcggcccgaggagcagggatgatccggtttctgcacggcgcggacttccacctggacagcgcctttggcgccctgccgcccggacaggcggcggcccgccgccgggagagccgggagctggctctccgtctggcggactacgtgaaggaacacggcatcgatctggtgctgctggcgggggatctgttcgacagcgccagccccttccgggagacgggggaacagctggccgccgctctgggacagatgcgggccagggtgttcatctcccccggcaaccacgactggtacggacccggcagtccctgggagacggtggactggccggagaatgtgtacgtattcaaagagaacaggctcacggccgtggaggtgccggagcggaacttggtgatccacggggcggcattctccggcccggaacagccggagagcctgctggcgggtttcaccgccccggcagacggaaagtgtcacatcggcctgctccatggggagctggacggggcggaggcgcggtacggccccatccgccgggaagaggcggcggccagcggcctctgctatctggcactgggccacgtccacaagcggacggcgcccctgacactggggcggacggtctgcgcctggcccggctgtccggagggccgggggttcgacgagctgggggagaaaggtttttacgaggggacgatctccgacggcggagaggtctccctgacctttgtgccctttgcccggcaccggtatgaggttttagaggtggacgtcaccggaaaagagccccgggccgccgtggaggcagctctgccgccggagacggccggggacctgtaccgcatcctcctcaccggcgagaccggagagggcggcgctggcgccgcggccatccaggaggcgctggcggaccggttttacgccctggaggtccgggaccgcacccgtatggcggaggacctgtggcggcgggcggaggaggactccctccggggcctgtttctccgggagctgcgccagcggcggaagcaggcggagacggaagcggaacgggcggagatcgacctggcggcccggttcggcctggcggcgctggaccaccgggatctggggtgagcggaggagcggatgaaatgaatgagatgaagaagattctgctgatcggcactggcggcaccatcgcctcggacgtgacggacagcggccttgcgccggagctgaccacggagcagctgctctcccatattcccgggatctcggacatctgcggcgtggactgcctccagctgctgaacctggacagcaccaacatgaccccggctcactggctggagatcgccgcctgtatccgggaccactacggctgctatgacggctttgttatcacccacggcacggacaccatggcgtatacggcggcggccctgagctatctgatccagggtagtcctaagcctattgtgctgaccggcgcccagagacccatcggatttgattccacggattccaagacaaatctggcggacgccttccgctgcgcggcggaggacctgccgggggtctctatcgtgttcaacagccgggtgatcctggggacccgggccaagaagacccgctccaagagcttccaggccttttccagcatcaatcacccggagctgggcgtcctgcgggacggcgtgctgctgcggtacatccgccaggactgccgggaggccccggtgttttacgaccgcctggacccgcgggtggccctgctgaagctggtgcccggcaccgggcgggatgcggcggacttcctgctggagcggaacgacgccctgattatcgagagcttcggcgtgggcggcctgccggaggcgggcggcttttacgactgcgtccgccgctggatggaggcggggcgggtcgtcgttctcaccacccaggtggagaatgagggcagcgacctgggggtgtatcacgtgggctaccgcctcaaaagcgatctgggggtgctggaggcctacgacatgaccacggaggccgtggtggccaagctcatgtggatcctggggcagacccggcggcgggaggaagtggagcggctgttctacacaccggtggcccgggacatcctctggcccggcctgtaaagacagagggaaccgacgtccggaaaaaggcaggttcccccacttgacaaggaaaaaggcccgtgatatatttatttttactgaaaaaagcattgaaaaggacgctgtccgggactcgacagcagagagggaccgccgctggctgaaagcggaccccgccagagcccggaacacagccaccgccttggagccgcccaccgatatgtaggctgggacgggacctcccgttatagaggacacgagcggcatccctccggggatgcaagcagggtggaaccgtggaatacgattttgtatcccacccctgatttttcaggggtgggatttttgttttctgccccttgaacaaaaggaggatcaaccatgtctgaagaagtgaagaacaacgagtttacctttgagaatccggcgtaccgccagacctactggcacacctgctcccacgtgatggcccaggccgtgaagcgcctgtggccggaggtgaagctggccatcggcccctccatcgacgagggctggtactacgacctggacgcccccttcgccttcacgccggagcacctggagaagatcgaggcagagatgcggaagatctgcaaggagaagctgaagctggagcggttcgaactgccccgggaggaggctttgaagttcatggaggagaaggcagagccctacaaggtggagcttatcaacgacctgcccgcagacgcccatatctccttctacaagcagggcgagttcacggatctctgcgccggcccccatctggactccaccggccgcatcaagggcaacgccctcaagctcaccgcttgcaacgccgcctactggcggggtgattccaaccgggagaccctccagcggatttacggcatcgccttcccgaagaaggacgagctggatgcctacctccagcggatcgaagaggctaagaagcgggaccaccggaagctgggccgggagctgggcctgttcatgctgcgggacgaggggcctggcttccccttcttcctgcccaagggcatgaccttgaaaaacaccctgctggattactggcgccaggtccacaagaagtacggctatgtggagatctccacccccatcatcctcaaccgtcagctgtgggagcgttccggccactgggaccactataagcagaacatgtacaccactgttatcgacgaagaggattacgccatcaagcccatgaactgccccggcggcatgctggtctacgccagcgagcctcactcctaccgggagctgcccctgcgggtgggcgagctgggcctggtacaccggcacgagctgtccggtgcgctccacggcctgttccgggtccgctgcttcacccaggacgacgcccacatcttcatgaccccggaccagatgaaggacgtgatccaggagacggtccgcctgttcgacgaagtgtactccaccttcggcctcagctacaccattgaactcagcaccatgccggaggatcacatcggcactgtggaggagtgggagcataaccaggacatcctgaaaaacgctatcaccgacatgggcaagaccttcgaggtcaacgagggcgacggcgctttctatggccccaagctggacttccatctggccgattccctgggccgcacttggcagtgcggcaccatccagctggacagccagctgccggagcggtttgaactggagtacaccggagaggacggccagaagcaccgccccgtcatggtccatcgggtggttctgggcagcgtggagcggttcatcggcgtcatcaccgagcactttgccggcgcgttcccggtgtggctgaacccggtgcaggtgaaggtcctgcccattacagaccgcgccctggaatacgccgatcagatcgcaaagcagctggatgccgccggcttccgggtggaggtggacggccgcaacgagaagatcggcaagaagatccgggaggccaccctggagaagatcccctatatgctggtagtgggcgaccgggatatggaaaaccagaccgtctccgtccgcctgcggaccggtgaggatctgggcgccatgtccgtggcggattttgccgcccggctgaagcaggacgtggacaccaaggccatctggtaaaaatgcgttcccctcacagcggcccggggccgaacccggaccgctgtgtccgattccgcaacgggcgctcccgcatccgggcagcggaaagatggcgggcattttcggtggttctgcacattgccgggaccgcccggacggtatacaatagaaaaaacatccggcactttttgcagaggaggcggctatgagtcaggagattcactatttggagaccggatcccaggaccctttttacaatctggcgtttgaagagacggtactccgcagccggcggtcgggggagtatctgctcctgtggcagaacgacaacaccatcgtcatcgggcagaaccagaacgccgagggtgagatcaaccgggcctttgtggaggcccatcaaatccatgtggtgcgccgcaccaccggcggcggcgccgtgtaccatgatctgggcaacctgaactactccttcatcaccgacgtgggagacgcggagcggctgaccatggagcggttcacccgtcccattgtggaggccttgcagggattgggcctgcaggcggaggcctccggccgcaatgacatcctggtggaggggcggaaggtgtccggcacagcccagcggctgctccgcgggcgcttcctgtatcatgggacactgctgttcgacgccaaccccggcatggtgtccggggcgctgaatgtggacccggcaaagttcgagtccaagagtgcaaaatccgtgcgcagtcggatcggcaacatccgggagttcctgaagacggatatggatatgcccgccttctggagttatctgaagaaaacattggccggcagcggtctggtggaggatcacctgacagatgaggaactggctgctgtggatgagctgaagcgcaccaagtacgacacctgggagtggaacttcggccgttccccaagtacaacctgcggaacaagcgccgctgggacggcggcaccctggagccctgtgtggaggtggaccaggggatcatccgccagatcgtgttctacggagattttctggctgtcagccccatggacgaggtgaccggcgccctgatgggcacgccattccggcgggaggacgtgggggcggtgctggaccgcttcccccttcgggactatttcggaaccatcacccgggaccaggtgctggatacaatattttatgtggactgagacagcgtccgcagaatcaaaaagagagacgcgcccggcgcgtctctctttttgattctgtcaggtcaggatttcccgctggaacggctccagcagcagccggacatccggcaccccctggagctggcccgcacccttgacggcggcatcccgatatccccagcggtcatcgtgggagaaggggagatggtataccaccagatgctccggccggatggcctgttcgatgaagtgacggcccttccgaagagtcacccaagggaagttcaaaagggccagatcaatggggcggttgccgatgaaatcccgcagctgcgggtccgccacggcgcagtctccggcgatcaggacccggaaaccgtcatattccaggatacagccgtagtgggggacctcccggtactgtgcaccctcgtgagtcaggcgcatgaagtccatgtgcagcccctccagggtgagatggctgctgggaccggccagcaccagctggcggtcaaactcctgctccggcagcaccagggccacctgcggattttgggcaatcacctgctctgtcagggcgcgggagtaatggtccggatggcagtgggtgaaaaagagcagatccgggctggcgaagtccggatgagcctgaagaatgttccagcgctcaggggtgacagtggagaaccccacaacccgatggtcgtggagcgcgtcggaccagacccgcatggcacccagatgcagggcgaccccggcgttgacgctgagtgtgatttggcaatgggacatgatgtcgctccttgtgtgtacaggatttttacttgcgggacaaacgtctttcagaataaaatttcaaaatgccatgatttgcgtaaggcttgcgtaagaatcggcgctttgcggttttatggttgattataccatactttttccgaaaaatcagcaaaaagtccaaaaataatttatttttctgttaaaattgccatatttttgctgtttgtacaaaattggcaaagagccacagaacaaaaatgggcaaaatgacaaatttccgattgctgattgatattgaattggcaaagtgatatacttgtctccgttaacagaaatttaatatgtatttctgtgaaacaggcggctttgcggcagtttattcatacggcatgatagacaggcaactattcatgcgcaggagacgtataaatattctgttaagacggggcgccacactaactgaagggattgatcgaatgaaaacctacaagacgatcatgaacgggctcaccaaagtcgaggaattcgtgctctgcgtgattaccgtcgtggttacagcgatcacgtttatcaacgtgctctctcggtatgttttccactccaacttcgcgtggtccgaggagctggtcatcaacgtgttcatcctgatgatcatgctgggctgcgccctagctaccagagacggcagcatgattacgctgtccctgatcttcgacaatgtgggcgtcgggggtaaaaagattctgaccgtgattgacacggtcgtgaacctgatcttttacgccatcctgatctacaccggctttaacaaggtgttcgatcagatcagcaccggcaaagagaccttctctctgggctggcccgaatgggtgtttaccatcctgctgcccatcggctccatcttcctggtgctccatgcgatcgagtatctggtcgacgtgatgagcaacaaggccgcctgtgtgaagccggctgagacagagggaggcaaagagactgtatgattaacttgatcctgttcggcagcttcttcgtgatgctgctgctgaatatccccattgccgtcagcctgggtatgtcttccattttcgccctgctcttcagcagttccccctgacggtcgtccctaccaacgtgtacagcggcatggcaaagttcctgctgctggctattccgttctttgttctgtccggcaacatcatggccaaggcgggcatctccagccgtctggtggcgtttgctgatgactgcgtcggccatcggcgcggcggcatcgccatcgtggctgttatcgtggcctgcttcttcggcgccatctccggctccggtcccgccaccgtggcggctctgggcattatcctgattcccgccatgatcaaccgcggcggcttctccgcccccttcgcctcttccctgatggccagcgcctcctccatcgccatcgtcattccgccctccatcgcattcgtggtgtacgcctccatcaccggcgtctccgtgggcgatatgttcatgggcggctggattcccggcatcatgatgggcctgtccctggtgatcatcatcatgatcgagtgccgcaagaagggcatccaggcatccaaggcaaagtcctcctggggccagcgctggaagtccttccgtgaggccttctggggcttcctgatgcccgtcatcatcatcggcggcatctacggcggcgttttcacccccaccgaggcggctgccgtctccgtggtatacggtctggtggtcggcgtcttcatctatcgtgaggtcaagatgaaggatatgatcgatatcctggtcgactccggcaagaccaccggcggcatcatgctgatcatcggcgcggccaccctgttctcctatgtgtgcacggtgttcggcattgcgcaggcggcccaggctctgctgctggagatctccggcaacaagtacatcttcctgctgatcgtcaacgtgatcttcctgattgcaggctgcttcgtggacgccaactccgccatgtacatctttatccccatcatgtaccccgtagccacccagctgggcatcgaccccgtccacttcggcgtgatcgccacagtgaacctggctatcggccaggtgactcctcccgtgggtgtcaacctgttcgtcgccatcggtgtgtccgagaagcttcagggcctgcgggacaagaccaaggtcaccattgtctctatgtccaaggctgtgtggccccagattgtggcatgcattattgcgctgctgctcatcacctatgtgccctggttctctaccgtgctcttgttcggcaaataagcatctcctgacttggctgtaaccgcgctttgcggtttcagataatacctgctacaactattttaaggaggcaaaacaatgaaaaagtttcttgcactgctcctggcgctcaccatggctctggccctggtggcctgcggcggtggcgatgacgctgccagcgataccactgccgacagcggcgatgatgctgccgcttccactggcgagttcgaggaaatgacctggaagttcgcctgctccgccacggagacctctccctgggtggacggcgccaaggagttcgcccggatcgtgggcgagaagaccggcggtgccatcaccgttcagtactatcccgctgaccagctgaccgccggcaaccagaccgacggcatccaggccctgatggacggtaccaccgagttgtccatgcactccaacctgatctggtcctccttcgaccagcggttcaacgtggtctccctgcccttcctgttcagcagcacggaagaggctgacgcggccctggacggcgccggcggcgaggctctgggcgagattctggagagcacctacaacgtgcacctgctgggcattgcggagaacggcttccgccacatcaccaacagcaagcacgccatcgccagcaaggctgacatgaacggcctgaagatgcgtgtcgcgggttcccagctgctgaaccgctcctatgagctgtggggcgccgactacaccaacgccaactggtccgaggtgttcaccgctctgcagaccggcacctacgacggccaggagaaccccctgcccaccgctgatgccgcttccatccaggaggtccagagctatctgacctattggaccggcgcttatgactgcctgttcttctgcatgaacgctgagctgtacaactccctgtctcccgagctgcaggccatcgttgacgaggccggccaggctgcctgcgagtacgagcgtgagctgaaccgcagccaggatcaggagatcatggacaagtgggccgaggctggcgttgagatcaccgagctgactcccgaggctgctgctgagttcgctgaggcttctgcccccgtgtacgacgagttcgccgacgagctgacccccgagctgatcgaggctttcaccagcgtcactcaggctgatgctggcaccactgagcccgccgcctaattgaagaggcagcctgcgtttccgtataaacaacggttaaggtttcgtaagttgcgttagctgagaggacgtggctgcaggaaactgttgccacgtcttttcagagaacataggtgaaaattttgacgatttcaccgcccagcgcatctgtcccagcaaatttcaaagagtgccgacaggagagtcggcagaagggagtttttcctatggcagcaacaaaggcagcaaaatacaccaaggaactggcggagcacttttatgagaccatgtgcaccatccgcaagtttgaggagagcgtgaagcacgacttcctgaatggtgagattcccggcttcgtgcacctgtacatcggtgaggaggccatcgccactggtgtgtgctccgctctgcggaaggacgatatgatcgagtccactcaccgcggccacggccactgtgtggccaagggcgcggatgtgaaccgcatgatggctgagatcttcggcaagaagaccggcctgtgccagggccgcggcggctccatgcacattgccgacttctctgtgggtatgctgggcgccaacggcgtcgtgggcggcggctacaacctggccaccggcgctgccctggccagcaagatgatcctgaagaacgaccgggtttccgtggtgttcttcggtgacggtgcctccaaccgcggcactttccacgaagccatgaacgtcgcttccgcctggaagctgcccgtgatcttcgtcaacgagatgaactgctgggcttccaccacgccttaccgcaccacctgcaatgtggagaacatctccgaccgcgcggcgggttatcatgtgcccggtgtgatcgtggacggccaggatgtctttgctgtgtatgaggccgccaaggaggctgttgcccgtgcccgtgccggcgaaggccccacgttcatcgaggccaagacctaccgcattgagggccacttcgtgggcgaccctgaactgtatcgtgaccacgccgagacccagaagatctatcacgacaccgatcctctgaagatgttccgcgccaaggccgccaagctgaagctgatgaccgccgaggagtgcgacgccatcgatgccaagtgtgagcagaagatcaaagacgccaaggagtacgctatgcagagcgagtacgccgatgcgtccgagtacatgaagtacgtctacgtggatgactaaggcgaaggaggacaaatacgatgcgtaagatcactttttctcaggccactcaagaggccatggccgagacgatggcgaaagaccccactgtattcgcaatgggcgaggacctggcccgtcagggcggtatcttcggtcagttcaagggcctgccccagcagttccccggccggatcattgatacccccatttccgagacctttatcatcggcggcggcgtaggcgcggctctggccggcgcccgtcccgtggtggacatgcacttcgccgacttcatcggcgtgcccatggacgagatcttcaaccagatggcaaaggtccgctacatgttcggcggccaggccaaggtgcccctggtcctgcgtgcgcccgacggttctgccggcggcggcgctgcacagcattcccagtgcgtggagtcctggttcgcccacatccccggcatcaaggttgtggcgccctccaatccctatgacgccaagatggtgctgaaggccgccatcgagtgcgatgaccccgtgctgtacttcgagaacaagatcctgtacaaggagaaaggcgaagtgcccgagatcggcgaggaggagccttacaccctgggcaaggcccgcgtggagcgtgaggggaaggatgtgaccatcgtgtcctactccatcggcatgaagaatgcccgcggcgctgcggacctgctggccaaggagggcattgaggccgaagtcatcgacctgatcaccctgtctccctgggataaggagaccgtgctgaacagtgtgaagaagacccaccgcctctgcatcgtccacgaggctgtcaagcagggcggcttcggcgcggagatctccgccaccgtcgcggaggaggccatggagtatctggatgcccccatcctgcggtacggcgctcccttctgcccgatccccttcgctcccaccctggagaagatggtgaaagtggttccggaggacctggtaaagggcatcaagggcatgttttaatgcctgttgaaaaggagattttcaagtatggcaactgaagtattgatgcccaagctcggcctgacgatgaccgagggcaccattgaagagtggaaatataaagagggcgacgctgtcaagaagggggacatcctgttctccgtagcgacggataagctgaccaacgacgtggagtgcgaagaggacggcaccctgctgaagatcctgctgccggagggcgagaccgccccctgcaagagcgtgatcgcctggatcggccagcccggcgaggcgattccggatgcctccggtgccgccgcgcccgccgcggccgcgcctgctgctcctgccgctgcgccgtccgcagcctctgccgcggctcctgccgccgcccccacggcccatgcggaccgtcccgccggtgcctacgtgctggcgactccctacgccaagaagctggcgaaggaaaagggctatgacctctcccagatccccggcaccggccccaacgggaccgtggtggccaaggacgtggagaactttgtggccggtcccaagaccagccccatggctgccaagctggctgccgagctgggcgtggacgtcagcaagctggacgtccagggccgcgtgatgaaggcggacgtgctggccgccgccggtgtgggtgcagccgcagctcccgccgctgaggccgctgccgctgttgagagcaacgacgagaagcctgtgaaggtgaatccgctgcgccgcagcatcgctgccaacatgaccaactcctggcacacctctccgcgggtcacctacacccgtccggtggaggtcacggctatgaaggacctgcgggccaagctgaaggacggcctgaaggagcaggggatcaagctgacctacaaccacatcctgatgaaggtggttgccaaggccctgaccgagttccccgacgtgaacgccagcttcgcggacaatatgctgacccgccacaagcacgtgaacatgggcctggcggtcgccaagggcgatggcctgatcgtgcccaatgtgaagaactgcgaggagaagtccctggcacagatcgcccaggagacggaggctctgatcgaggccacccgcaccggcaagctgggcatggaggacatgaccggcggcaccttcaccatctccagcctcgggccctatggcatcaccagcttctctcccatcatcaaccagcctgagctggcgattctgggcgtgtgcgacatggtggatacccctgtggtgcgcaacggcgagatcgtgatccggaccatgatgaacctgagcctgactgccgaccaccgcgtgatcgacggcgtgatggcctccaagttcctcaagcggatcgcggagctgctggagaacccctacatgctcctggtgtgagatcaaacaacccattcaagggaacccggcctgtgccgggttccctttgaggggtcattgtccaaaatttgacgatccaaacaactcaaaggccgaattagaggcggtttttgggtaagttcatgaaagaaggacagaaattatggcaactgaagttctgatgcccaagctgggtctgacgatgaccgagggcaccattgaagagtggaagttcaaagagggagacaccgtcaagaagggggacatcctgttctccgtggcgaccgataagctgaccaacgacgtggaggccgaggaggacggcaccctgctgaagatcctgctgccggagggcgagaccgccccctgcaagagcgtgatcgcctggatcggcgccgccggagaggcggttcccgatgctgccggcgccgcggctcccgccgcacccgctcccgccgctcctgctgcacctgccccggctgcagcccccgccgcagctggccagaagaccgttatcgtcgtgggcggcggccccggcggctatgtggctgccatccgggcggcccagctgggcgccaaggtgaccctggtggagcgcgagcacatcggcggcacctgcctgaacatcggctgcatccccaccaagtgcttgctgcacagcgcggagctggtgtccgagatcaaggaacagggtgctgacatcggcgtgaaggtctccggtgtggaagtggatttcccccaggtgatcgcccacaagaacgccatcagcaagcagctgacccagggtgttgccggtctgctgaagcagaacaaggtcgcccgcgtggacggcgaggccagcttcaccggccccaagaccctctctgtgaagaagtccgacggctccgtggaggagatgaccgccgacgccatcatcgtggccaccggctccgtcaacgcccagccgcccatccccgggctgaaggagaatcccaactgcatcgactccaccggtgcgctgagcctggagaagctgcccaagagcatggtggtcatcggcggcggcgtcatcggcctggagctggcctgcgcctacgcggccttcggcaccaagatcaccgtggtggaggcactggaccacatgctgcccatgctggacggcgacctgactgccatcggcgtgaagcacatgaagaagatgggcatggagttcaacctggagtgcccggtgcaggccgtggaggcctctcccgtgggcgccaaggtggtctgcaagaacaaggccggcgagaccgtcagctttgaggcggagaaggtgctggtggccatcggccggaaggccaataccgccagcctgaacctggaggctgccggccttgccaacgaccggggccggatcatcgtcaacgacaagatggagaccagcgtgcccggcgtgtacgccatcggcgactgtgtcttcggcaaggcccagctggcccacaccgccagcgccatgggcgaagtggctgcggagaacatcatggggatccctgccgtgtatgacgaaaagaccaaccccacctgtgtgtatatggagccggaggctgcctctgtcggtctgaccgaggagcagtgcaaggccaagggcatcgactacaaggtgggcaagttcccgctggtggccaacggcaagtccctcatcatcaatggcggcgagggtctggtgaagatcatcgctgacgccaagtacgaggaagtgctgggtatgcacatcatcgggccccgggctacggacctgattgccgagggtgctctggctctgcggctggaggccaccgtggatgagctgatctccacgatccactctcatcccacggtttccgagtccgtgcgggagtgcgctctgaacgtccagaagcgcgccatccacatcaagaactgattgcgtttcccgatgacaagggccgccgctatcaagcggcggcccttgttgctgcgtgaagaacggtatggtgcctaaatggcgcggcaaaactccagtgtgcagtccaggaggatataaatgcgggaagcccccgtatacctccagatttgcctgacagcgtaacaggaatacagcgtgtggagctgcagggggtactgtaccggtcgggaaagacggggcgtttcattttctcctttgcttgtccacgccgatcttttatgagaaatgccgatcaggagatgcacgctgaacgctgaagcatgggatgaggcggggggattcaactgtcatgttcacgcttttctggcatatacctgcctgtcgttatggttatatcataaatagagtgaagatattgcgcatgttttgcatctgatacatttcaccatggagaaacgggaggaacggccttgaagaagcggagaaatcccgctataatggggtggcatgaacggacaaggagggcaggagaccatggcggtgaccggacggtttgcgccgtcgccaagcgggcgcatccatttggggaatattttgtgctgcctgctggcttggctcagcgcccggcagaagggcgggagagtgatcctgcggatcgaggatctggatatcgcgcgatgtccgcggcgctatggggagcagatgtgccgggacatccagtggctgggactggactgggacgagggacctgtcatcggcggccccagcggcccctatgagcagagccggaggacggcgctgtatcaggctgctctgaggcgactggaggcccaggggctggtctacccctgcttctgtacccgggcggagctccatgccgccagtgctccccaccgggaggatggacaggtggtctacccggggacctgccgcggtctgaccgcggagcaggcggcagagcgggcccggcgcacaggccgcgcccccgccctgcggctgtgggtgccggaggaggagatcactttcaccgacggccacatgggggagtacagggagtggctgcctgcggactgcggggattttctgctgcggcggtcggacggcatatttgcctatcaactggcggtggtggtggatgacgcggccatgggcgtcacagaagtagtgcggggggcggacctgctggcgtccacccccagacagctgctgctgtatcggctgctgggactggaggcaccggcgttttaccatttcccgctgcttctgggaagcgatggacagcggctcagcaagcggaacgcggatgcagggctggacacgctgggagagcggtatacggcaccggaaatcctgggaaagctggcatatctcgcaggcttcaacccctcggcagaacccagaagcggggagagcctgctggaggactttgcctgggagaaggtccccagagcggatatccgcattccggagggactgttttgaaaaggaagcggcacaggctgacagcctgtgccgcttctttagttgctttgtcccgaaagggcgtctggaatctccacttctgccatcagctcccggctgatgatggtgagcatctcctccagcttggcgcactccgccggggtaaaccgctgcgtgatgcggttcatgacggcggtcatgtaggccgtgctgatgttgtagtagtcgatatacttctgagtgatctccagatggtattcccgccggtcgtcggaagactggaccttgcggatgtagcctttcttgatgaggctgttgaccttgtatgccgcgttgggaggggagatccgcatgaaggtggcaaattcattcaccgtgggactgcccagagcctgaatggcctccatgcagaaggtctccaccgtcgtcagactggcctcacgatcctgaaagcggctgaagatctcctggtaaaagtgcagcttgaacttggtgtacacgttaaaaaagcgtctttcagcatggctgcaagccctctttcccgcgccttgcccgcatggcgggaaagcgtcggctgtcattccgcaccgatggcgaaggtcagttccgccgtacaggccagttcgccgttgaccgtggccttgcactcgccgatgcccaccggcccgcggcgcttggtgagaacgcactccatttccagcacgtcgccgggggtcaccttccggcggaagcgggcgtttttcacgccgccgaacagggcgatcttgccctggttctccggcagggagaggatggccacggcgcccacctgggccatggcctccaagatcagcacaccgggcatgacgtgctcctgggggaagtggccgcagaagaactgctcattgacgctgacgcacttgcggcccttggcccactggccgggctcgtaatcggtgatccggtccaccagagcaaaggggaaccggtggggtaggatctgcgcgatctggttggaattcaattcgtttgccatggtctcacgcctcccatcgtttgaacagcaggctgccgttgtggccgccgaatcccagagagttggacatggcgtagcgcacatcggcgctgcggccgtgacccggcaccacgtccaggtcgcaggcgggatccggcacctgatagttgatggtggcgggaagatagccgtcatgcagcgccatggcgcagaacatggcctccacagcaccggcggcgcccagcatgtggccggtcatggacttggtggagctgatggccagcttgtaggcgtggtcaccgaacacagtcttgacggcggccgtctcgccggcgtcgttcagggggtggaggtgccgtgggcgttgatatagtccacatcctccggcttggcgccgccgtctgcaagggccatctccatggccttggcggccccgctgccgtcgggccggggagcggtcatgtgataggcgtcgcaggtggcgccgtagcccacgacctccgcaaggattcgggcgccccgggccttggcgtgctccagctcctccagcaggaggatggccgcaccctcgcccagcacgaagccgctgcgctccgcgtcaaaggggatggaagcccgcttgggatcgggattctgggtcagggccttcatggaggtgaaggcgccgatggccagaggtgtcacagcggactccgtgccgccgcagagcatcacatcagcataaccgtcccggatatagtggaaggcatcgcctacggcattggtgccgccggtacaggcggtcaccggacaggagcacatgccccggaagccggtgtggatggcgatctggccggcggccatgttgcagatgccggtggggatatagaagggagagacccggtcccagcccttctccttgcccttgtcgtgctctgcctccgtgatggagaggccgccgatgccgctggagacaatgacgccgcagcgatccgcctccgcttcatccaacgtgaagccagcaccgtccagtgcctccttggcggagacgacggccatctgggtgaagcggcccatccgcttggcctctggcttgctcatgtagttctccggcacgaagcccttgacctccgcggccagatggaccttcagatcggtgggatcgaattgggtgatgggagcgatgccgcacacaccgtccttcacagcctgccagctctctgccgcggtaaggccaatgggggtcacggcccccaggccggtgatcacgactctccgtcgttccatagtatacctcctgtagatagagttgggagcacccggaaaaggtgttccaaaaggccccgcaaaaggaagggggctggggaaatccattcggggttccccggttgatctgccagaggcagatcaagaaattccaatcattttcggcagggcgcaccccagggcggcttctcttgcccctgcggggcaattcaccttctgtacctgccgaaaatactttgacccaagccgctgaaagcggcgcagaagtgcccttggggtgcagactggtgatgggggttcagcggagccggtggcataccggcggagcgtccaagggggacactgtccccttgaatgcttcacatcgccatgcccccgtcgacggccaggacctggccggtgacataggcggcctcgtcgctggccaggaaggccacggcctttgccacatcctccggtgcacccagccgctgcatagggatggtgggcatcatggcgtccttggcggcctggggcatggcagcggtcatgtccgtctcaatgaagccgggggccacggcgttgaccgtcacgccccgggaggccagctccttggccagggacttggtcatgcctaccacacccgccttgctggcggcgtagttcacctggccggcgttgccccggaggcccaccacgctggagaggttcacgatccggccgtaccgctgcttcatcatgattcgggacacggccttcatgcacaggaaggtgcctttcaggttggtgtcgatcaccgcgtcgaagtcggcctccttcatcatcatcacaaggccgtcccgggtgacgccggcattgttcaccagaatgtcaatccggccgaattccttcacagcggcatccatcagggccttcacctgggcctcgtccgccacgttgcactgcacggccagggccttggcacccaggtcctcgcaagcggtcacggtctcctgggcagcttccgcccggccggcgtagcacagcaccacattggcgccgccccgggccagctcctcgcagatggcccggccgatgccccggctgccgccggtgaccacggcggtctttccagcaaaattcatcatgccttctcctttatcagttgttccagcgtgtcgggcaggttctccacatccgctgcggtctccaccgcgcagaccggtatgccgggaacggtctttttcacaaaaccgctgagggctttgcccgggccgatctccacgatggcgtccacgcccatgtcggccatcttccggatggagtcctccatgaacacgctgctctgcacctgcttcaccaacagctcctggatgggggtgctgtcatccttcacatcccccaggcagttgaagatcacggggatctggggatccgcaaacgccacgccctggaagtattcccgcagggcattcccggcaggggccatcaggggggtgtggaaggggccgctgaccttcaggggcaggcaccggcgggcgcccttctccttggcaatggcggcggccttctccacagcggccttctcaccgccgatgaccagctggccgggacagttgtagttggcgattaccacgcaccccaggtcagaggccgcgtcgcaggcatcctgcagggggctgcggtccagattcaggacggccatcatggcgctctcccggccggcagccgcctcctccatggccttgccccggaaagccaccagacggatagctgtggcggcgtcgaacacaccggcggcgtgaagggcggagtactcacccagggagaggcccgccgccacagcgggggtgatgcccttctcccgcagcaccgccgtcataccggcggcaaaggccaccatgcagggctgggtgtagcgggtctggttgatgatgccgtccgggtcctcaaaggtgaccttcttcaggtcaaaatccacttccgcatggtcgtaaacagcccggaaagcggaaaacgcctcgtacagatcggcgcccatgccggcatgctggctgccctgaccggcgtacaaaaagcccagtttcattctgcgtcgctccattctgcggcggtggccttcgcccgtgcgataccgctctcatacagatcacggaaaatctcggccacgggccggatctcgtggagcataccagccacctggccgctcatgacgctacccatttccacatcgccctccagcacggcccggcgcaggccgcccagggtgaccttctccagctcctccagagaggcgccgcgcttctccagggccagatactcccgggccatcttgttcttcaggattcggaccgggccgccgatggagcggccggtgaccaccgtatcactgtccttggccttcagcacagcctgcttgtaattggggtggatggggcactcctcgctggcaagcaaacaggtgcccacctggatgccgcaggcacccagggcaaaggccgcagccgcctgacggccgtccgcgatgccgccggccgccaccacgggaacgcttaccgcatcgatgacctggggcaccagggccatggtggtcatctcgcccacgtggccgccggactccgtgccctcggcgatgatggcgtccacgccatagcgatccagccgcttggccagaaccgccgccgccactacgggcatcaccttgatgcccttttccttccaggcgggaatgtacttgccgggattgccggcgccggtggtgaccactttcacgccctcttccagaatgatctgggcgatgtcgtcggcataggggctcatcagcatcagattgacgccgaagggcttgtccgtcagctccttggcccggcggatctcctggcggagacggtcgccgtcccagccgccggtggcgatcatgcccagggccccggcgttggagcaggcggcggcgaactcgccggtggcgatgttggccataccgccctggataaaggggtacttggttcccaggatttcattgagctttttcataaaaatctcccattcgccgctgtgcgcggcctaaataaagctgaagttttcgccggtaacaggcttgcgtccagagcgcctgcttgacgtgcagggagtcaggcgaactccaccagggcgccgccccaggtgaggccgccgccgaagcccaccaccaggacccgggagccgggccccacctttcccaggtcatggagctcactgatgaccagggggatgctggcggcggaggtgttgccgtatttctggatgttcttgtagtacttctccggggggatgtggtactttttggctgccaggtcgatgatccgggcgttggcctggtggaagacgaagaagtccacgtcctcaatggccatgacggccttttccagcacctggtcgatgcagtagggcactgccttaacggcgaacttgaaggtgggctggccgtgcatgaagatgcgggccggcgccggcttctccgcgccggtgacgcccagcatgtccgggtcgccgtggcagcccagaacggcgtggatggagggatagtcctcccgccactccaccaccacagcgccggcgccgtctccgaagaggacgcaggtgccccggtcctcccagttgatgaaccgggagagcatctctgcgccgatcaccaggccgtacttccggggggcctgggccagcaggcactccatggtgtggatggcgaacaggaagccgctgcatgcggcattcaggtcaaagcacaccgcgtcgtggggcagccccagcccccgctgcaccatgcaggcggcagagggggacaggtagtcggaggagaaagtggccaccacgcaggcgccgatgtcctccggggaaatcccggcgttttccagcgcctgccgggcggcgcccacgcacatatccgtgtgggtctccgtggtgcagtggtggcgggtctggatgccggtgcgggtggtgatccactcgtcgctggtatccacgatttttgccaggtcgtcgttggtgacgattttcgcaggggcgaaccggccggtgcctctgattttgattccgctcatgcttcctccttctggggtgctgcgcccatgcgtctgaatttttgataccggcctgcggccagagcggctccgctctctttggagagctccgccaggcagcggctcagagcccgatccacctgccgcatgtgggcggcgggagccagatgggcgccgccctccggctcagggatgatgccgtcgatgacgcccagctccagcaggtccggcgccgtcagcttcatcagctcacaggcttcctcatgtctggcggagtccttccacagaatggaggcgaagccctccggagagaggatggcgtacacagagttctccagcatcagcacccggttggcaacgcccaacgccagcgcgccgccgctgttgccctcgccggtgatgagggcgatgacggggacggtgaggcggctcatctcatagagattccgggcgatggcctcgccctggccgtgggcctcggcctccaggccaggataggcgccggaggtgtcgataaacgtgaggatggggcggcggaacttctccgcctggcgcatcagccgcagagccttgcggtacccttccggattgggcatgccgaagttgcacttgaggttctcctccagcgttttgcccttccgggtgccgatgacggtcacagggcggccgtggtacagggccacgccgcccaagatcgcggcatcctcgccgcagaggcggtcgcccttctgctcaaagaagtctgtgaacagcgcctgaatataatctgtgatattgggccgctgggggtggcgggcaatggccacccgctgggcggcggtcagcggttcgctcatgtgcgtccccctttctcatggagccgcagcagctgggacagggtgtcccgcatctgaaggcgcggcaccaccgcgtccacaaagccgtgctcctcctggaactccgcccgctggaagccctccggcagggtctggccgatggtctgctggatgacccggggaccggcaaagccgatcagagcgccgggctccgccaggatgatatcgcccagagaggcgaaactggcagtgaccccaccagtggtggggtccgtaaagacggaaatatacaaaagccctttctccgagaagcgggccagcgccgcactggtcttggccatctgcatcagggagaggatgccctcctgcatccgggcaccgccgctggcggcgaacaggatcaggggcaggcggttcttggtggcgtactcaatggccagggtgatcttctcacccacggcggcactcatggagcccatgaagaagcggctgtccagcacacccactacgcatttgcggcccccgatggtgccggtggcggtgaccacggcctccgtcaggccggtcttgcgctgggcggcctccaccttggcccggtagccggggaaggagagcgggtccgccgcaggcagcttttcaaacagctcccggaaggagccggggtccagaatcgtgctgagtcgatagtaggcgccgatggggaaatggtagccgcacttggggcagaccgacaggttctgcgccacggatttgcggtcgctgtcctgcccgcacttgggacaggtgatggctttatcgccgggaatgtgattgtcccggatggccttcatggccagcaggcgcgcccggcgcttggcgaagacgccgttcatcccactcatgcatccaccccgctttcactgagcttgcggctgaattccagcagctccgacaggtgttcatccaggaaggcagtggtgcactctcccagaatgaactccggatggtacagaatctgataggagagctccgcattggtggggaagccctccagagtgaactcctccaggcagcggcgcatccgccggatggtctccatccgagtgggggcgtaggccaggatcttggctgccatagagtcgtagtaaggagacagctcgcacccgctgtacaggcaggagtccacccgcacgccggggccgccggggaaatggaggaaatccacccgtccggggcaggggcggaacccctgcacagggtcttcggcgttgatgcggcactcgatggcatggccctggagcgtcacatcctcctgccgcaggcgcagcgccaggccggaggcaatccgcagctgttggcgcaccagatccacaccggtgaccagctcggtgacgccgtgctctacctggatgcgggtgttcatctccatgaaatagaaatgctcccggtccgggtccagcaggaactccactgtgccggcattctcatagccaacggctttggccgcctttacggcggcggcgcccatccgctcccgcagctccggcgtcaaacaccgggcaggggcctcctcgatgagcttctggttccgccgctggaccgagcagtcccggtcccccagatggatgacgttgccgtagcggtccgccagcacctggaactcgatgtgccggggccggagcaccagtttctccagatacatctcgtcattgccgaagcaggcctgggcctctgccttggcctccgcaaaggccgcggacagatcctccggccggtcgcaccggcggatgccccgcccgccgccgccggcggacgccttcagcagcacaggatagcctacggactctgccgcggtcagcgcctcctccacagaggcgaccgggccgtcggagccgggggtcacgggcacgccggcggcgcgcatcaggtcccgcgcggcagatttggagccggccttgcggatggcgtcgccggaggggccgatgaaggtcaggccagctgcggcgcaggcgtctgcaaagtcggcgttttcagagaggaagccatagccgggatggacgccgtcgcacccggtggctttggccaccgtcagaagagcatcctgattcaaatagctgtctgccgcccgggcagggccgatgcacaccgcctgtcccgccagctggacatggagcgcgtccgcgtccgcctgggagtatacggccaccgtctcgatccccagctcccggcaggcccgcaggacccgcagggcgatctctccccggttggcgatcaatacccgcctcagcatggccgataacggaacagcggctcgccgaaggccaccagctcgccgttgctcttgcacacgctctcaatgacgcagtcacagggagcgggaacttcgctcatcatcttcatagcctcgatcaggcagacggtctggcccttggacacccggtcgccgggcaggacaaagggggcctggtccggggcgggcgccgcgtagaacgtgcccaccagaggcgcgtcaatagaggaggagctgctctggggcgcaggcaccggagcagcggcggcagccggagcggccgcaggtgcgctggccgcaggcgcagacgcgccgccacgggtcagctctatggtgaactcctgcgtggacagcttcatcgtctgagcggtgctgcggtcgaagcaggcgacaatctcaaaaaactcttggttggtcatagcgcattcctttctcagcggaaagtgaacccgccggagggcgcgggcccgccggcggggcagggattactgcttgtgggcgttcaggtagttcatcacgtcgccgacggtcttcatctccgccagggcgctatcctcaatggagatgccggtggcctcttccagagccatcaccagttccacggaagccagggaatcagcacccagatcgtcagccagggaggcgtccattgtgacttgctccgcgtcgcagcccagggtctccacgatgatatcacgtacttgctcgaattccatattggtactccttatgtcgaaaaatgatgaaattattttaattaaaataatttaactaaaataatttcacgttgattttatgcggtttatgccggtttgtcaagtaaaattttggagaacgcccgccttctccgggacgtggcagccgcaccttatttaattataaggaagacagcgcctgccgcagcgcgtcgtcgctggcggggacgccccagaaccggagtgttccattgatctccagggcgggagtgcagagggtctccggatgctcactcgtcacctgttcgttcagcacccggcagccggggcagtaggcgtacaggcagggcatcagcaggtccatccggtcgatcacatcgtcgtctgtgattttctccagagtgtagtccaggccgagaccgtcggcaacggcccggatgcggtccatgtagaagtcgttccgggcacagatggaacagtacaggcgcagtttgacaggggtgctcatttcatcgtctccttattctccgggcggggcccatattccgcagaacagcataccacaaggggaggcagggggaaagacggcgtcctattttttggagatttgacgaaaaagatatttgcttttgccgatatatccgctataatgtgggaggattgcgccggaggatccccaacggaacctgtcccggcggaagaaaggatggaggaccgcatgaagatcgtcattgtgggcgcgggcaaggtgggcgtggccctgacgcgccatctggccgtggagaacagggtcacagtgatcgaccaaaatccacatctggttgagaacatcatcaacatctatgatgtgatgggcgtgtgcggcaacggcgccagctacgatgtgcagaaggaggcggatgtggagcaggccgatctgctgatcgccactacctccagcgacgagattaatatcctcacgtgccttgtggcgaagaaaatgggtgtgcagcacaccatcgcccgtatccgcagcccggaatacggccgccagctgcggtttatgcgcagtgagctggggctgtccatggccatcaatccggaggcggcaacggcccgtgagatcgcccgtgtgctgcggttccccaccgccatgaagctggagtccttctccaaggggcggctggagctggtggagtaccgggtggcggagcacacggccctggacggcacccggctttcggaactgtaccggaatttcaaggtccgggtgctgatctgcgccgtggcccggcagggggagacgatcattccctccggcgatttcaccttgcgggcgggagacaagatctatctcaccgccgcaccccgggaactggagaagttcttccggcttctgggcgtattccgggcccgggcctcttcggtcatgatcgtgggcgccagcaaaatgtgctactatctggcatctgagctgctggagatgggcatgtccgtaaagatcatcgaccaaaacgagcagcggtgcgtggagatgagcgagaaactgccccgcgcgctggtgatcgtgggagacgggacggacagcgagctcctcagcgaggagggaatcagccagacggacgccttcgtggccatcacgggcctggacgaggccaacatcctcatggcactcagcgctgccaagcagtccggcgactgctgtaaggtggtggcgaagatcaaccgcaagtccctgctggagctggtctccaccgagagcctgatcgacagtgtggtgtccaccggtgcggtgaccacagagctgatcctccagtatatccgggccatgaagaacgcctccgcctccaaggtgaaaacgctgcaccgcatcgtggatgagaaggtggaggctctggagttcagcgtgacgccggacatctccttcgccggcgtgcccctgcgggatctgaatctgaagcggggcctgctactggcaggtatcgtgcggcagaacgggcagatcgtcatcccctccggcaatgatgtcctgcacctccacgacgatgtgatcgtagtgaccacggacacccagctggaggatcttcgggatatccttgcagagtgagaaggcaggtaagttctgtgaattatcgaatgatcggctttgccattggccgtatcctgctggtggaggcggcgctgctgctgcttcccatggcggtggctctgggatatggggaatcccctgtcccgtatctgctccctgcggcgctgctggtgctgtgcggaggattgctgagcttcaaaaagccgcggcaggcgtctctgttcgcacgggacggcctggcggtagtggcgctggcgtggattgccgtgtccctcttcggtgcgctgcccttttacatctccggctccatagagagctttgtagattgcttctttgagacagtctccggcttcaccaccacgggggccaccatcctgacggaggtggagtcgctgaaccggggcattctgttctggcgcagcttcacccactgggtgggcggcatgggtgttctggtgttcgtcatggccattctgcctatgggcggggatggccacgggatgcacatgctgcgggcggagatgcctggacccgcggtgggaaagctggtgagccgcatgagcgacaccgccaaaatcctctacggcatctacctggtgatgactgtcattgagatcgtgctactgctggcgggcgggatgccgctgtttgacgcctgcatccactccttcggcagtgcgggcaccggcggcttcagcagccggaatctcagtgtgggagcttataacaacccctattttgaaattgtgatcggcattttcatgctgctcttcggcatcaatttcaatctgtattacttcctgctggtgcggcggttccgggacgtgttccggtccgaggagctgtgggcctatgtcctcattgtggcgacggcagtggctgccatcaccctggatatcgtgcacatgtacgagtcggtgggcaccagcctgcggcacgcgtttttccaggtgtcctccatcatcaccaccaccggttatgccacggtggatttcaacacctggcccaccttttcaaaggccattctggtggcgctgatgtttatcggcggctgcgccggttccaccgctggcggcatcaaggtggcccgggtggtgatcctgcagaaggtgtctgtcagcgagatgcggcggatgctccaccccaatgcggtgcccgccatccagttcgagggcaagcccctgaacgagcggagcatccggggcgtccatctgtttctggcggtgtacctgatggtcttcgtggcgtcctgcctgttggtgtctctggagcagttggacctggtgactacgttcacagcggtggctgcctgcatcaacaacgtggggcccggtctggagattgtaggtcccatgggtaacttctccagcttctccccttggtccaagctgctgctgtccttcgacatgctggtgggacggctggagatcttccccatgctgcttctgttcgccccttccatctggaaacggcggctgccgtcccgcaggctggtggactgacttgcctgaaaatcaaatccaacggaacaggaccgccgcggagatctgcggcagtcctgccgtcctgtcaagcgcccgccgccgcggagggcgctttttttctgcggtggggggaaattgccgggcagcgcgggacaacggccaccggcaaccgcgtctccaaagctgcccgccccaaacagaggaatatgtttccccggagcgccgccccaccggcaagcggacaggagggcctgcgggacgctgtgagcggcgtcccgcgggatgggcttcgggcatcacggcggctaaaggatcggctgacggatacgaagaggaggcaagtagacggcggcatccggacagaggcgggctctggagagacgcccggcccggatcctgatgggcgagaagaagctgcaccccggcggagctgtggaatcaaaagagcggggccccggaggacaatggcaaaacctccggggccccttgaagggattggacaggaatcgtttcaaaacagaacgctagcggatggggttggagatgcgaccgatcccgtcgatctcgcaggtgaccacatctccgcgcttgaggaagcagggggatccattcccatccccactccggcgggggtgccggtgatgaggatggtgcccgccggcagcgtcatgccctgcgagagctcactgacgatgtggcggatattgaagaacacctggtccgtcacgctgttctgccgcagctctccgttgacaaagcttctgatggatagcgcgggcgggcaggggaattcgtccgcagtgacaatgaccggccccatggcaaaaaaggtatccaggctttttccgaggaagttctgcttgtggcggtactggacgtcccgggcgctgacgtcgttggccacgctgtatccgaagatgtagtcgcccacatcttcctcccggacatggagcgcgtccctgcccaggacaacggccagctccacttcataatccagcttggagacaaaatccagatggccgtcgatcgcctccccatcgcccagggcccggaggacatccgccaggcgcagagcctgccggcttccagcgagctgtatctgcgcccaatggacaagctcatccagactgccggcagttccgcgctgcccgttctgatccaggggcggtggggacccacaagggcgtggtggcccgtcgcattcacaccaaaagcgccacggaggggaccacgctgatgcgcctgcagtgcagggacctgacggagaaaaactgggacatgctgttgaataatgccgcgtctcccattcacgccacgggatacacggtatatctggaaaacgtggatacgctgccgaaggatctgcagcagcaggtggggacctatattgaggataccaagatgacccaccgccatcgggtaatcagctccagctgctgcgacctgtctgccgaggtggcccggggacagttctccagccggctctatctgcagctcagcggattcaccatcaatgtgccgtctctggcccagcggaaggaggatattcccgcctttgtcaatatgatgattccccagtacaataccgcgctggccaaatccaccgtgggcatggagccggatgccatggagctgatggtggaatttgagtggccgctgaatctggtgcagctggaaaaggtgctgcgccagatgatcgcggcgtcctcgggattttatatcactgccgctgaggtggccgcggtcctgcagaacgagatgcggaaagtgagtgcccttccgccggcggtggatctctccgggaccttggaggacatcgagcggagagtgatcgaacaggtgctgcgggaggagaacatgaatcagtccgctgcggccaagcggcttggaatcggccgaagcaccttgtggagaaagatcgccggcagcggcggaaaataaacaaaaaggtccgggggcacagggaatatccctgtgcccccggaccaaatttccggcagcgcggaagcttcacttgccttggattcccagcgcgcggcagacgctgcggcgggtgatgcggtataccccatagagcaccgccgaaagcacggcgatcaccgcagcacagacggccatgccggccatctcgccgggggtgaagcggttatcattgaagtacataatcatgaggtagaaggcggagatgactgccgtgcccacgatggcgggcacaagaaacaccttggacacctgcccctttacggaccggaacagatagcggttcggcgcccccaggtgccgcaggtcgtcgtacacccgtgcgttggtgagggcgatggtcatgcaccgggtaaaggcaatgacgatgaccgccgcgaagcagatcagggcgataaagatgaacagcaccaaaaacaccgccatggtggtgacgaagtcgttctgatccagcacccggaactggggcatgtagagccagtagttgcggaactccgaggtgtcccggtcctcccgctctatcaccgggaagccatgggcggcgatatgtgcccggtcgtagtcatagacctcgccggcctcctccgccagcgccgcacttaccaggtcgtaggcgtacatctgcagcacatcgtcgccggagcggtccacgatctcgttgaacagggcgtcggcaaagggatagctggcctccgcatccgccacgttgaagaatacccaggtctcccgccagaggtcggtgagtccggcggtgaggatctcgtagtcggcgtcatccagcacgtagcagcccagcagcatggtgaaacacagaggctccgccggggtaacggacagactggccccggtgaccatattggtgaccagcgtcacgtcgccgccggagaggtagtcgctgccgccttcatcatccagcacattggcacaggtgccgggggccaggtccacagcttggccggtgagggcgttccaggcgctctcggaaaaataggtggccccgccttggatctcccggtattccttggtgtaggtggtgcccagagctccggcgctctgctcgatggagacggtgccgtcacagcccagggtggcggcgtccacctgggtccaggaggtgatgtcaacaccatgcttcgacgccagagattccacctcaccccgctccggccagttctgatcattccgccagtggtactcgaagtccaccggccgggtggagaagctgtaagtggagctggtattcagcatgggggcgtaaaaggaggcgaaataggcaccggcgatcagcagcgtcatcaccagcatgttccgcaccgtctggcggccttggaacttcatcatggacgtggcgatgatgtcccggtatttatggcgcttccgccagccgttcaccaccgtgtggagcaggatcatgtacatgccgaccagcgccggcaggtaaaagacggcctccaccccagaggggggataccactggagaactgtgacaaagaacgacggcatcagataccccgccagggcgccgatcaccaccaggacgatgcccacgcttccataccaccgctttacctcgcggataggctcggacttgtgggactcctggacgatgtcgatgatgttggtgcggcggatggaccggccgcccaggaagaacagcatccccaccacgtaggcggcaaagaccatggacagcagataggaccggggatcgaaggacagggccatctcctgggagtccaccaggaacaggcggaacagctgccacacgccccaagccagagggccgcctaaggccgccccggcggcgcaggagcccagggagatcaccgccagctccttgcccatctcccgctgcagctggcggcgggtggcccccagggccaggaacacgccggtctcccgggacttctgccggaagaacagcccggcggcataggcggtgaacacggcgcagccgatgaccgccagaacgaacaccatcatcacctgcttgcggctgtcgccgccctccggcaagacggagaggatggtgggggagcgcatcatgcagacataggcagtgatcagcagcacggagaagaagctgcaccctgccagcaaggcgtactggcccctgtttttgcggcgcagggccgcgtaggcgtcggaaaagtgccgcatggtctcactccttccccatgtcccggatggcgtccaacagctggtcctgaaaggcggtgcggtccgtggcgcccttttccagggtccgccacaccactccgtcccggaggatgaccacccggtcgcagaaggaggcggcaaaggagtcgtgggtcaccatgaagatggtggcctccagggattccttggcctgttcaaaggagcgaatcaccgcccggctggacttgctgtccaggttgccggtgggttcgtccgccaggatcagcaggggatggttgatgagcgcccgggccacggcggtacgctgcttctcaccgccggagatctccgccgggtatttgtcccggatggcggagataccgaatacatcgcacagctggtccgcccgggcctccgtctggccggtgacggcgccgccgatgatggcgggcaggagaatgttctcccggaccgtcagaccgtccagcagcaggaagtcctggaacacaaagcccagctgccggttgcggacctttgccaaagcgtcctcgctgagatttgccagctgccgatcccccagcatgatctccccactgtcgatggggatgtagcaggagatgcagtttaagagcgtggtcttgccagagccggaggggcccatgacagccacgaactccccttctccaccgtgagggacacgcccttgaggacttcataggtggtcttgcccacttggtaggatttgtgcagatctttgactgttaacataaaactcttcctttctgtctcacaggatattccccgccagggcgatggccgccagatgggcgggatagaaggcgtagaagaaccagcggttgatcttgatgcgggagtgcgtggcgcagaagatcaggggcgcggcgaacacggcgaaaatggaccagtcgatgcagaggccgcccaccgtcaggcacaggggatcctccggccagccgttcatcagggccggaagataactgaggaggtagagggccgcgcccaggcggggccggttccggcagaggtagaaaatcagcatcagctggatgccggtgccggagtaatcgaagttccaccagctgacggtgaagagcgccagggcgaacagccaccatttccgttccttcaggccgtacatgcccagcaggctcaggaacagggtgaagaagatgttccagttggtgaggttggcccagaattcgccgaccgggtggaaggccaggatgtaaaagggctggctgacgagggcgaagatgcccagccgggtcaggtacttccgcacgtcgtgggtgtacagcaggcccaccgtcaggcagtagcagaagatagggaaggccagtcggccgatccagcggaacacgcccacctccgggaaaaaggcgccgccgatgtggtcgatcagcatggcggcgatggcgatgagcttcagcagatccgtgtccagattggttttcagccgtggccccgtctgggggatggcggcgggagtggtgagcacgctccacacacgggagcgggagatggcagtggcgtttgtcatggtgtttccctccttgttgacaccagcgtaccgcgaaaaaagagccgccgcaaacgggggtgtcatctgcggcggcctggatgtcaagttttgcgttgggaggggaggggatgtcaagtttggcggatttgccgtcaagtttggtttggcagacggcggttcctgtggtagaatgggcaggtagtttagggcgaaaagcgccccctgccggaccccggcgggcagttttcggtttgaggtgatggggatgctgcggatcggcatctgtgacgatatctacgacgccaggctggtgcttcgggccgctctggagcgggtcctggaaaagcggcgcgttcaagggcagttccgggagttctcctctggcgagggactgctccgctggctggagagccacgccggggagctggacctggtgtttctggacatggagatgggggagctggacggcatggagaccgcccggcggctccgggcggcggacgccggactgcagctggtgttcgtcaccgggtatgcagagcacgtctttgacgggtactccgtgggggccctggggtatctcttaaagcccccgaaggcggaacagctggaggaggtgctggaccgggcacaggcggcgctggtccgggatttggaccgggcctacatctgccgcagcggggacacccactaccggatccccattgccaacattctgtatttcgtctcggaccggcggcaggtggcctgtgtcaccgccggacgggagtacacgttttacggcaagctggacacggtggcggcggaggtgggggcggactttgtccgcatccaccagcggtatctggttcggacaggagctgtggaccggatggagggcggcgaggtggtgctgcgggacggccggcggctgccggtcagccggtcctgccagccctcggccctgctggcctttacccgggcggagctggagggatgaggatgcgggatgttctctggcagatctggctcaactgcggctattttctgaccgtggcggccagcggctttttcctctacaagctctgtgccccctttgtccgcccccggaatgggcgcttctggagggtgctgctctttctgaccctggcggggtccaccggcatggtgatttggatcggcgaccccaacctgctctatacgctgccggcgtttttcgccttgttcctcctctctacccggggtgaccggatagggcgggtggcggtgtgcatcatcctcttctgcctggagatgtccgtgtgtgccctgctggacacctatgtggagcggatcaacaggaatgcgctctatgacgtgctggtgcgcctggcccgcccgctggtgttcggcccgctgtggctgttgctgcgccgccgcctgccccgggagccggtggtgctctcccggcggctgtggaagctggtgctgggtctagcggccatgcccctgtgcgccctgattgccgtggtgctgctgaccttccggcggtatgactctatcgaggtcaataccgtggcgatgtaccagggcatggtggtgctgccctttgtatttctgacctctctggtcctgttgttcgccattttgattctggcggatcacgagcggctggagcaggcaaatcgcctggcaggtctgcgggaggtctactatcagggcctccggcagcaggagacccaggtgcgccgtctccgccacgatctgcggaatcacctgacggcggtccggggttttctggagcagggagatgaacagggggccatcggctatctggaccagatagccggttccccggccctgcggggaaccagacggctctgtgaaaacgaggcggccaatgccgtcctcaccgccaaggcggaggccatggagcgggagggagtcgccgcagacttcgccgtcttcctgccccgggacctgcctgtggcggatatggatctgtgcgccctgctgggcaacgctctggacaacgccatcgagggcagccggggcgccggggaacggcgaatcaccatccgctgcaaggcggacaagggactcttcatgctgcgggtggagaacaccctgggcggcgcggtgcagccggatcttgcaactaccaagacggacaaggccgcccacggcttcggcatccccgggatgcgggaaatcgcggagcgctatggcggcaccctggacgccggggtccgggacaacgggttcgagctggtggtgtgcctgcccctggcagggcaggccgaaacactgtaaatccccatgcgctgacggccgccgcagacacaggagagagctcgattttccatatctgcggtgtatttgcacagaaaaacagggagaccgtccaatggacggtctccctgctccgcagccaaagcggactcaaagcatcttcaaaagttcgatctgttccccggaggggccagtgaagaaccagttctccaacccgccgaaggtgttgggcatcacgcacttctctgcggtctggaaggtgtccacgccggcggcgcggagatccgcggcggcttggtccacatcgtccacatagacggcgaaatgagggatgcagcccgcaccctccggcacaggggcggcgatcaactccaccaggaagccgccgaactccacaagggccagctcccgctgctgttccggcgagcaggcgggggcccggagatgcaggctgccgccgatcttctcgtaaaaggcgatgctggcatccatatccgccgtatacacggcaatgtggccgagaccttgatagtgctgtttcatacaatcagtcctccagtatgtgaaaaatgaaaatatggcatcaggaggcggcagtccggccgccggggatcagggcgcccactgcgccgcagacagcggcgggcaacacccagccgaaatccagagacgccaggggcagcaggtccagaaaggccagctccacgccggtgtaggtgcggactacctccagcaggctcactgccagggcgcccagggccgccaggcggaacacccagtcccggcggatgcggctgccgaacagggccagcacgatcagcaccagcgtggggggatagaccacgctgaggatgggggaggcgatggcgatgatctcattgagaccaaagttggataccacggcactgaacacgcagatgacgcacaccagcgtgcggtaggaaacgcggccccccgagaggccggagaagtaatcggcgcatgcgctgaccagccccacagcggtggtgacgcaggccagagccaccaccacggcaaagaggatgatgcccgcctgccccagcaggttccggacaatggacaccaccaggaacgtgcggtccacggtgatgtcgaagaagcgggcggtggtggcgcccagataagtcagccccagatagaccgccagcaggccgatgcctgccaccagactggcgccggacaccacccggagctgggcgccgggagtcgtgtgtcccttctcccgggcgctcttcagaatgatatagccgaacacgatggccgccagcacgtccatggtctgatagccggcttccacgccggtggcggccacattctccaccagcggctgctcacccaccggcccgatgggattcaccacacccaccacgatcaggatcaacaggccaatcagcagagcgggggtcaggatctttcccacgatgtccaccaccgctgtttcccgcacgcacagcagcaggatcagcagaaagaagaggatggagaagagcgccggactgaagccggacaccagcggggccagagaggtttcgtaggtggtggcggcagtccggggaatggccagcatgggaccgatgcacagcacaatggcgcacatgagcgctgtggagggaatcctgccgatgcgggcggtgatcccgtcgggacttccctgccggagaatggcaaacatagccagcagggccagtccgatgtcggccataaagtaactgaaaaagccggccagccactccggacccgattccagtcccagataaggggggaagatgacattacctgcgccgaaaaacatggagaacagggcgaaaccgatgaccaagctgtcctgaaggtgtttcttcataggagacctcctcttgccttgcaggtggacggatgtccgctgaataagggcaaagcggccgcgcggacgacgcgcggcctgtgtatttatttgatgtttatgcttgaaacaattatatttgaatttccgaaaaaagtcaatgttatacacaccgaggcggtcatgggcggagcagcggagaaaaatcgccggagcgggaacttttttccgtagagcccgtctaacctctcagaccgcggcggagcgccgtgaaatcccgtgagaggttaggagaaaaacatgaaaaagagaggacttgcaggattgctggctctggcgctgatactggcgctgggtgcctgtggaggaacggaggcgcaggaggacgccgcccaggaccagaagatggaggaagctgcgccgccccaggaggaagagacttcggaaaccgatggggaggacggcgtccctgtgaccatagagggccctgagacggcggatgattcccagcagctccaggaggacgagccggatctgggctcccgccccgcggacccggcgaaggagccggagacggggagccgtccggcagacccggcggagaagccgatataccagccggtggaggacacaaagccccagcagccggacaaggagccggagacgccggcccagcccgcccctgcccctccagcggagtctgcttccggcgtggatctagcggatttctgcgcttccgtgaccggggaccaggagacgtggcccgccctgatggccgtggagggtgagacgctggatacgttctatgcgggactctccgccatcgccacccagcagtgtctggtgcagatggccatgatctccgcctccggtgacgagattgccctggtagaggtggagaacagcggcgatgtccaggcggtgaaggacatcttccaggcccgaatcgactatcaggtgggggacggcacaagccccggcggtgcctggtaccccgcgcccacggagatgtggcggaacgagtcccggattgtctccaatggcaactttgtgatgctggtggcgcacaccggcgcggacgcggtggtggagcagttcaacgccctgttcgcctgagtggggtcccgcaatgcggaaaacgaagcaggactttttaagtcctgcttcgtttcgttccgatcagattttgatgagctcgtatgcccgggtgccgatgccgatcttctccgcgtgctccaggcagacggcccagtccgtgtccggatgggcggcgtggaagtagtcaccggaggagcagtcgcagccctcgtcaaacagggcggagttgggcgcgggagtctgggccagcacggcgtcggcacaggcttggtccagagccaccgggtcgaaggaggcaaacatgcccacgtccgggacgatggggacatcgttctccgcgtggcagtcgcagttgggggagacatccaccaccagggacacgtggaagcaggggcggccgtctaccacggccttggtgtactcggcgatcttcttattcagaatagcgggcgcctcgtcatacaggcactggatggcatccttggggcacaccgccagacaccgggcgcagcccacgcacttgtccgtgtcgatggtggctttgccgtcggcaccgaactggggcgcgccgtgggcgcagatcctggcgcaggcccggcagccgatgcacttcttctgcttgacgaagggcttgccggagttgtgctgctccatcttgccggcccgggagccgcagcccatgccgatgttcttcagagcgccgcccatgccggcctgctcgtggcccttgaagtgggtcagggagatgaacacgtccgcgtccatcaccgcacggccgatcttggcggacttcacatactccccgccctccacgggaacctccacctcgtcgttgcccttcaggccgtcggcgatcaggatgtggcagccggtggagtagggggtgaagccgttgatataagccgattcgatgtggtccagggcgtttttccggccgcccacatacagggtattgcagtccgtcaagaagggcttgccgccgtgggacttcaccaggtccaccacggcccgggcccagttggggcggaggtaggccaggttgcccggctcgccgaagtgcatcttgatggccacgtacttgccgtccatatcgatatcgccgaagccggcggtcatcatcagccgggccagcttctggggcaggttctcccgccagctgggggcgcggaagtccgcaaagtagactttggatttttcagccatgatctcgttgctcctttttctctttctgttctttgaaacaagcctggagagaaacctctccggtgccggggcggcgtgccttccgccttacggcaggtccacagagatgttgtcggtgccgtgctcgtcaaactcggagagataagcgtcgatccgctccatcagctccccatagttttcacgggtcaggggttccccatccatgtcccgcagggccagctcctccgccaggatctcatagaacaccacgtcctcatactgctcgatggcctcgtggatgccgccgtccgcaaaggcccgggaggggatcagctccccccggtacagctccaccagcttgctcatcttgtggtgcaggcagtgggagaaaatcaggctctccacctggtcgtattcctggatgcggtcgttctcccgggtggaattgatgacccagtttcctatgtataccagatccagcagataccggaactgctgttccgtcagttcgatcttcatggggcagacacctcccaaatagatgatactgtcacgattatagcagagacatacgcagaattccacataaaaaacagggcaaaaagactaaaatctgtcttgcggcagaaggcgccgcatagtataatatgtaatccagatgcaaaatgagcatgaagcggccgccggtccggcggcgggagaagaaggaggcggagcgggatggaccagcgtcccatcggggtattcgattcaggcctggggggtctgacggcggtgcactccctctggcgcatcctgccggaggaggacctgatctacttcggcgacaccgcccgggtgccctatggcagccgttcccgggaggccattttgaaatacgcccgccaggatgtgcgtttcctgcgctccttcgatctgaaggccatcctcatcgcctgcgggacggtgaccaccacctcgctggcggcgctgcaggcggaaaacgacctgcccatggtaggcgtggtagagcccacttgccgccgggcggtgctgatgacccaaaacaagcgggtagggctcattgccacggcggcctccgtccgctccggtgcctacgaggcggctctccggcggctggacccggaggtgaccgtgttcagccgggcctgccccctgttcgtgcccctggcggaggccgggcgcatccggcggggagacgtggtgatcgagaccgtggcccgggagtatctgacgcccctgaagaatgcgggggtggacaccctgattctgggctgtacccattacccgctgctgacggatgtgatcggggacgtgatggggccgggcgtggagctggtgtccgccggggaggagtccgcctttgagctgaaacggatgctgaaggcccgggagctgcgggcggacgagcgccgccgcggcgagacggagttctacgtcagtgaccgggtggaggattttgagcggacggcctcgctgtttctgcaggaggacctgcgccatacagcacggaggattgacattgagcgatattgagacgcggcagaagaagctgccggtgctgctcttcatccggggagagcagtattttgacgatgtggacccggatgccacggagctgacgacggaggggaccctggagctgacggaggagggcctgctgctgacctatcaggagacagccctcaccggcatggaggggacgaccaccacctttgaggtcagcgggccccaggtgatcctgcgccgggtgggcagtgtgaactcccagatggtgtttgaggaggggcggcagcacacgtccctgtatgagaccccctacggggagctgtcggtggatatccagaccagcgccctgcggcacaacctcagcgagcggggcggcctgctggagatcaagtactccatcgcggtcgagcatacggtgacaggaagaaacagcttcaagatccgggtaaagcgaaagtaagagagcgttccggcaaaccgtgcggcagcgcgtccaagtattttggaggagccaaaatctttggcggagggcgaattcatttcgcccggggattccgagaaaaggggtccccgggatctgtcccgtgggaagcgcacggtgacagggaaaaacagctttaagacccgggtaaaacgggaaaaacaggggttgggaattaggaattgcggtgccgccgcaggtggcaattggaatctgtccggctttgccggacaccaaaattcctcattctgaattcctcattcacgaaagagggaacgatatgatcaacatggtacaaaacgcgaaggaccaggcggcggcgctggccatggccgcctatcaggcggcagtggcggacgggacgctgccccaggcggaggtgaagaccgccccggtggagatccccaaggacaccgccaacggcgacttcaccaccacgtttgccctggcggcctccaaggcgctgcggcagccgccccgtaatatcgcccaggcactgctggaccacatggacctggcggggagctactttgcctccgcggagattgcgggaccgggctttctgaacttccgtctcaacgacagctggtacgctgccgtctgcgaggcggtggagagcgagggtgccggctacggcaccgccgaccacctgaaggggcagaagatcatggtggaattcgtctccgccaaccccacgggccccatgcacatgggcaatgcccggggcggcgtgctgggagacaccctggccagcgtgctggcggcgtgcggcgccgacgtgacgagggagttttacgtgaacgacgcgggccaccagatcgataagttcgcccactccattgaagcccggtatctccagatcatccgggggaggacgcggtgcccttcccggaggacggataccagggtgaggacatcaaggacctggcccgggcctattatgagaaaaacggagataagctgttggatgtgccggaggcggagcgccaggaggcgctggcccagttcgggttgtccatcaacctgcctaagatgaagaccgatctggagcggtacaagatccactatgacaactggttctacgagtcctctctccatgagagcggctatgtgaaggagacagtggatctgctggcggagcggggctggacctatgagaaggacggcgccctgtggctccgcacggccgacatcctacgggaccactaccgcaggcaggggaagaaagaggcggacatcgagaagctggacctgaaggatgacgtactgcgccgggccaacgggttttacacctacttcgccgcggacatcgcctatcaccggaacaagttcgctgtccggggcttcgacaaggtcatcaacatctggggggcggaccaccacggccacgtggcccggctgaagggcgccctggacgcgctcggcctcaacggcagcgagcggctggacatcgtgctgatgcagctggtgaagctgctgcgggacggcgaggtggtgcggatgagcaagcgcaccggcaaggccatctccctctcggatctgctggacgaggtcagcgtggacgcagcccggtggtacttcaacgccaagccggacacccagatggagttcgacctgggcctggcggtccgggaggacagcgaaaaccccatctactacgtggaatacgcccacgcccggatctgctcgctgctgcgggctctggcggaggagggcgtctccgtgcccagacaggcggacgtggacatgtccctgctctccggtgaggcggaacgggccctgctgaagcagatcgcccagttctgcgaggagatcaagctggcggcccgggactacgaccccagccacatcaaccgctatctccaggagctggcagcctgcttccaccggttctacaccgcctgccgcatcaagggcgaggagccggcggtccgggacgcccggctgaagctggcggacgacacccggatcgtcctgcggaacggcttgaagctcatcggcgtggacgcgccggagaagatgtgacgagacggcgcgcggcgcaggagggagacctatggaatttcagagagagccgggacgcatctacgccatggaggatgggcgcctgatcgccgaggtgatgttccccgaccgggacggagtggcggagatcgaccacacctttgtggatgacaccctgcggggccagggcgtggcaggacagctgctccgggcggcggccgaccaaatccgcacggaaggaaagcgcgccagggcgacctgttcctatgccaagatctggtttgaaaagcacccggaggaggccgatctgctgtgcccctgagagacgacgagagccgccgtgccggcgggagcagcatggccctccgggcggcgtttcccgccaccatcccggtgatgacgggctttctgtgcctggggactgcctatggccttttgatgcagtccaaggggtatgggccgggatggtccgtcctcatgagcgccatcgcctttgggggcagcatgcagtttgtggccgtcacgctgctgaccacggcctttgaccctgtgcaggcgtttctgctgtccgtcatggtcaatgcccggcacatgttctacgggctgagcctgctggacaagtacaagggcctggggaaggtgcggccgtttctgatctacgtgctgtgcgatgagacgttttccctggtgtccactctggagccgccggagggcgtggcccggaaggacttctacttctggatctccctgctggactacctctactggattacgggcacagccctgggcggcctgctggggagtttcctcacctttgacaccacgggcctggactttgctctgacggcgctgtttgtggtgctgttcctggagcagtggaagaagccggagaaccggcccgccggggtgatggggatcctctgcgccgccgccagcctggcggtgttcggagcggacaacatggtgatccccgccatggtgctggtgctggcggtgctgctgagtgcacggcgccgcctggaccgcagcggagaggagggagccctgtgacgctgacgcctttgcagacgctgggcatcatcctggcggtggccgccgggacccagctgacccgatggctgcccttttggttgtttccggagaagaaacggcctcccgccgtggtgacatacctggggaaagtccttccgcccgccatgatgggcctgctggtggtgtactgcctgcggagcgtctcctggctgtcggcgccccacggggcgccggagctgatcgccattgcggcggtggcggggctccacctctggaagcggaatgtgctgctgtccatcgccgggggcactgtgctgtacatggtgctggtacaggcggtgtttgtctgagaaaagagaagagatgccggccggcggaagcccggccggcatttttcagtgccgggggaggcttccttgtttccgaatcgttacaatttgttgtgaaactgagtggatttttgcaaaaaatcagggtattctgggcatgaaatgcagagaacggagcgcaaaaaccaggacctggaaagcgaggtgcgaacatgaagcgatttcttctctgcggggtgctgctggcgctgctggccggctgcggcactgccggggagcagctgccggaggaagtcccggaagagacggagcccctctccggcgaggagctgacggcctccgccatggcggcgtacgctgagatcacgaaggacctgactttcaccctggatgtggaagaggaagatgccacaggcatcagcctctccatcaccccggaggccgcccggaacgtggcggggcgggagaacctgttctccatcggctaccagtgggagccggcctcggcggaggcctggggagaccagtggagcgacatcaaaagcagaggacggctctttgccatgaccgccccggacggggagaccaccctccagtgctgcaccggcggggacgtggtgctgtggaccgtggacggggagacccactatgcctgtgtgacggctgcggcggagggggaatccggcctgagcggtctgctgcaggggatcgccgaggacgccctgtgggacgcggcgttttgcggtcccacggtggatggggcagagacggactacgaagagatcgcccggcagctgaacgaggccgtggcggagaatgtccgccatgtgccggactgggtcagctggaagcccctggacttccaggccaacggcgccagcgtgtttgacgcctattacggtgagccggagaacttctgtgccgggctgggcttccggctgctggtggatgacccgtatggagagatggccaacagctggcaggcgggcgcagggctgggagaaccggatgcggacgggtactacggctatggcggcgaggccagtatccagaaaaatgaggacggcgactggacctgcgacggtctggccaccggaggcagcgccgtgacgctgccactgtccggctctggggaggaagccccgctttcggagctggtggacgcattctttctgacggaggggttctcccatgactggctgctgcccaactacatcctggaccacccggcagaggacatgacggccctgcccgccctgctggatgaccggacagacgcagaggcccgggagctgtgtgccgtcctgggccggtgcctgcgggacgccgactactgggactgggcgccggagacgctggcggagactctgggaagctatggggcgtatctggatgcataaatctgccaacgccggtataaactgggactgcggcctggccgcagtccttttgttttgtcatggaggcggatatggggaagcggttgttttactgggagctggcgggtgcgctgttcacggcggcgctggggacgctgctgcactttgcctacgactggagcggcggatggggcgcggcggctgccttctccgcggtgaatgagtccacctgggaacatatgaagctgctgtttttccccatgttcctgttttccgtggtacaggtgtgctgcctgggacgaaactatccgaactttctggcggcccggggcgtcagcacggtgacaggggtcgcgctgatcccggtgctgttctatacgtacaccggcgtgctggggcggcatctgctctgggcggacatcgccgtgttctacctctccgtgctgggggcattcgccctggatttccggcttctgcggcgggggcggttcacctctctctggcagcagatcctgggcctgctggcgctgtgggggctggcgttccttttcgtctactgcacgttccatccgccggagctggggctatggcaggacccggtgacgctgggctatgggctccccaaatgaaagcaggcgcccctctttcgagaggggcgccgctttgcttccggggattttctgtccctgccgttgaccggctctctccggcggggtataatattgttaaaagcgacctggggaggctgaagcggatgaagaccacaagacagaagcgtgcggcgcctttttacgccgctgcggcggtatggctggcctacgcgctggtgctgccgctgtatgagccgctgcactatgccctggcggcgggggcctcccttctggcgttcgcggcggcggccgccctgtgccggggcggccccgtaggagaggaggctggcaaggcgccgccggaaaaggccgaggagcccgttgaaaagaaaccggcctctacaggaaatcctgagctggacaagatggtccgcgacggggagatggccatccgggagatgaaacggctggatgagaatatcgcggaccccggcatctccgccgacattgtgcggctggagcaggtgagcgcccgaatcttcgacgaggtgcgcacgcacccggagaagctgccccagatcaggcgctttctggactactacctgcccaccaccctgaagctgctgaatgcctatgaccgcatgagcggtaccggggtctccggagagaacatcgacaccaccctggccaaggtggaggggatgatgcggaccatcgtggcggcctttgaaaagcagctggacagcctgtacggcgccgaggccctggacatctccacggatatcacggtgctggagaacatgatggcccgggagggactggtggacagcccgctgaaggcggagccggacgagaagaaagagaccgatatccggctggagctgtgatcggaggaaacgccatgagaaagatcgccatcagaatggcgggcctggttttctatatggccgcaggatttgtccttctgttctggaaactggagcgtggcgggttgcataacgcggagctcctgctgccgctggcatggctggcgggggcggtggctttgggccttcggctggacaaggcctgtaaacaggcgggaaggtggggagaggctgcccatcactttttctcttccgtgatatggctgctgcttggtatcggttttatgaagcaggccccgggcatctgtaccctctgcggtgtgctgggggtggtgtacgcagtggtttatgctgtctgcggtgtgcgggcggcgggagaagcccgccggaatgaagaaaatggcagagagtgaatgatactatgatggaggatgacacaatggcagacgagaagagcatgatgcctgaactgaccctggatcccagccggacggatgcggtgccccaactgactctggacccggcagcgcccgccgcccccgcaccggaggccgccaagccggaggcgacgccggtgcggctggacgagaacctgctgaacgacgcggagaaacaggcggtggaggcgttttccaagaagatcgacctgacggactccaacctgatcctgcagtacggcgcggcggcccagaagaacgtggccagcttttctgagaacgccctgaactctgtgcgcaccaaggacctgggagaggtgggcaagtccctcagcgagctggtggtggagttgaagggcttcggcgaggaagaggagaagaaggggctcttcggcctcttcaaaaagacgggtagcaagctggaggccatgaaggcccagtacgccaaggtggagtccaacgtggacaagatcgcccgggagctggagcagcatcaggtcacgcttttgaaggatgtggccatgttcgaccagatgtatgagctgaacctgaaatactacaaggagctcaccatgtacattctggcgggcaagaagaagctggaggacatgcgggcgggcgaactgcctgctctgaaggccaaggcagaacagtccggcgctcaggaggacgcccaggcatacaacgacatggtccagatgtgtgagcggtttgagaaaaagctccacgacctggagctgacccggatgatctctgtgcagatgggcccccagactcggctgctgcagaacaacgataccttgatggtggaaaagatccagtcctccctggtgaacaccatccccctgtggaagagtcagatggtgctggccctggggctggagcacggccgccaggccacggcggcccagagcgccgtgacggagatgaccaatgagctgctgaaaaagaacgcggatctgttgaagatgggcaccattgagaccgccaaggaggcagagcggagcgtggtggacattgagacgctgcagcacaccaaccagcagctgatctccacgctggacgaggtgctgaacatccagcgggagggcgcccagaagcgcagggccgccgaggcggagttgggccgcatcgagggcgagctgaagcaaaagctgttggagctgagaaattaaagggagagcaggatccccctttggaatccccaccagtctgcggactggtgaacgcgcccggggcgcttggatcaaggtagtttcgccacgtacacgctgcggcgaaaatgattcaaatttcttctttcgccaatggcggaagaactggggaaaaccggaggctttcccttagccccctttcccgcttacagggaagggacggagaggacatacgcttatgaagttttttcagaaacgggccgtggcggcggtggtgctgattttagccatcgtggccggggtggtgattgggcaggccaagaagccggacaccggaggccaggcgtccaccgccattgtggggtcctatacgtatgtatatgactacgccggggtgctgacggatgagaccatggagcatatcgacgccatgaacgcctccttgtttgcccagaccggggcccagatcctggtaagtgtggtgaactccactggcggcgcggacatcatggactatgcctcggatctggggaacagctatggcgtaggctccgcagagcggaacaacggcgtggtgatgctgctggcgctggacaacatctcccaaagcggcctgatgggcgactactgcgtggtggtggggaccgggctggagagccacgcggacgatttcatgagtctgcagtcctattacctggagaatgatttcgctgccggggagtacgacgccggtgtgaaggcgacttttgatgccttcatcgcctggtttgccgacttctacggcgtcacgatccgggaggggtatatccctgccgtccgggagacctattccagcggcagcgggtactactatacggagacccacggctatgtggcgccggcctttgggtccctggtgagcggcgttgtggtgctgctagtggtgctgctggtgctgtgggtgatcctggacggaatgcggtactcccgctaccgccggcggtatctgcggcccggtatgggacggcccacggtgctgtactaccccatcttctggggacggccccagcggcccaggccaccccgtcctccaagaccgccaaagccaccgcgccggccgccctccggcggaacattcggcgggggcggcttcggcggcagccggggaggcatgttcggcggaggctccttcgggagtgccggagggtcccggggcagcctcggcggagggaccttccggggcagcggcggccgtcgcggcggctttggcggaggctccttccgcagcggcgggcgccggtaagagacagatataacggggcctgtatgccatttgaaaagcaggaggatcccccggagttccgggacgatcctcctgcttttgcgttggaagaagtattacttttgcggtgcggctcagcggatggggagcattttgccggtctcaaaggattccttgcagcgataggccgcctcggatacagcggtgccgtcgtagaccgtcaggtccgcagggtgtgtgccggtacggatgtggtccgtaaacgcctgcatctcagccagaaaagcggtgtgccagcgggacatgaagtccggatagtactcctgccgcgcaccatgctcatccacgacctgcagcaggttccgggcgcccacgggggcgatgcgcagcgtgccgtgggttccgacgatttccgtctctacattgcagcctgctgcatgggtgcggttggcaaagagaaagcccatggcgccgttttcgcactggaccatggcggcggcattgtctgtgtcatgcagttcccgacagaggtcgaactcaaagacaccaccgatggcccagacgttacggatgttagagccggtgaaccagcggatcagatccagatcgtggacgcacatgtccaggaactggccgccagagtgggggaggaatttcagtgtggattcaatggtgctgcggggatcctgggtgcaggagcggaccagcaccactttgccgatttcaccggcgtccacacggcgcttggcctcagcataggaggggtcaaaccggcgcatgaagcccagttggaacaccagttccggatgggcctcaacaaccttttcagcttccttgcactgagccacattggtgcccagaggcttttcacagaaaacgtgcttgccgtgctccatggcaattttgatctgctccacatgaagaaaagagggggagacgatgacgatgccgtccaactccggatcggcgcacatggcggcaaaatcggtgtaagtatgaggaacgcccaattcctctgccaccgcccggagacgggaggtatccacgttacagatggcgtggaggacgcagccgggaatggatgcggctaagttttttgcatgttcgtagcccagacggcccaggccgacagagccgattttaacagattccatatagcaccttctctctgggttttcaattttacagtatagtctaatcccccaaaaatacaagcgggacctgccttgaaagctggatactgccaaagaacttgaacagcggcacggctcttgagagccgtgccgctgttttgcgggaaagtggtccctggggatcagtccacctcccgcagccgttccacgatggtggccttggagacggagcggtacaccgccaggggaaccaggacgcccagcagggcgaacaccggggccacgatcaggaacggggtcagcgtcaggcggtaggtgaagaaccagaacatgctccccaccgccttgaaggccaccgggccgaaaatcagggtcagcaccagggagatcccagccgcccccagggcatagagcagcccctcatacaccagcatggtcttgagctgcttgccggccatgccgatggactggagcacggcgaactcccgcttgcgggcgatgatgccggtgaggatggcgttgaagaagttcagcacgcccaccagccccacgatgaaactgagggccccgccgcacagctggaacatggagcgcatcccctcgaactccgatgcgtagagcgccttgctctcatagtcgaactggggattcacgttctctgtgtagtctgccaggaacttctccatggcgccgttggcctcgtcggtggtatcaaaggcgtagtacatcacgctgtctgtgccgctgtcctgcatgaaggtctggtcattcaggatgaactcgtccgcgccgtagtagcggtagctgagagagatgggcacggcaaccagggcggctacttcgtattccacatcccggtatttcaccggctgcgccacatagttggcactggcgggcacgtcctccgggctggcgtaggcgatgccggtgtccggatctacatactccgtctcctccacgtaccggacggtgacgatgtcccccagccgggcccagtgggagtccatctccggattgccgtaatcatcatcactgtacacagcggccacataccgcccgccgtcctcatagagcttggacaggtctccctccagtaccgtcaggtggtccaatgcgaaatcgctcatgccggagagctggatccggtcggccagcaggccctcttcgttccgcccggtcaggcggatcagattgtccatctgctcctgggtatagaagtgctccttgttctgccggaaccagtcctcggtaacgtactccagggcatcgaacgtcttgccgtagatcacgccgccgtcggtaatgccgccctgggcattgatctcgtcaatgacggactgggggatgcccatatccgtgttgaagatgtccccgccggtctggaactggccggcgtccgccacgatgaagtcgctggatgcgaaatgagacacgtacttgtccatgtcgaagccgttggtgaagttcaccgtcactgtcagcagtaccaccgccagagacagggacgtgacggtgacggcggtcttgccccggctgcggcccaggttggcccaggccatggacagcagggacacgcccctgcggccttttttcgtcttgcgcttgatgccgccgccttcggtgtagcgcactgcctcgatgggagagaccttgccggcgatgcggccgggcttccggcaggagagcagcaccgtcaccagagagaacagcgccgcgccgatgaagatcaccgggctcacggaggtcatgggcaccacgccgttcagctgtgacacaatggccggcgtcagctggccgccgatcaaccaacccagcaccagccccagggggatgcccgccagggacaacgtcagcgcctgctggcggatgatccgccgcagctgccggggcgtggtgccgatggtcttcagcaggccatagaaccggatatcgttggtgacggagatctggaacacgttgtagatgatgagatagccggtgaagatgatgagcagcagcatggcggccacagcaatcaccacagaggggtccagattgtcgctgagctgggcgccggtatagccccagttgacgccagtgtggatataatccggcgctccggcgctctgatcctgatagccgtgattttccagaatttgagcgatatcgttcgcaatgtggcgggaaccgcttttcagcatcacatccaggttccaggaaccggtcatgccatcctctccgggcgggacggttcccacctcgtccagaatggcgtccgcccggctcttcggaatcaggatgtggttggccacaattgcctcgtcatactcccaccagccgcagagggtaaaggtctgggtggtggtatggccgtccacgtcaaaggagatggtgaacctggcgccgatctccggctccacccccaacagctccagcacgtgggtgtcggtagcggcctcgtcggtgccctcctggggcagacggccctccaccgggtcgcagtacatccagtgggcttcattggcgtcggcgtagctgacctccacgtgggatttgttgaacggcacctccgtgggcattccgataaaccgccgcattccccactggtcgatgagggggtcatccttcagatcgttaaactgttcctccgtcaggtacttgaagccgccgtgggagaagccgcccacctgacggaagttggactgctggaacccgtcgttgatggacatggcgatggtgaagagggacgtgaacagcaccgtggtcagggcgatggcgagaacggcgatgaggttgcgggtcctggccgccttcatggaccgccagcccagacggcggatggtcttgccgttggataccttcatcatggcgctcacccccgcaccacgatccgcccgtcctcgatgcggatgatccggtccgccatctgggccagctcctcgttgtgggtgatcatgacgatggtctggctgaacttctgggcagtgaccttcaggagtcccatcacgtccaggctggtggcggagtccaggttgccggtgggctcatccgccaggatgatggcgggcttggccgccagagcccgggcgatggccacccgctgctgctggccgccggagaggttgttgggcaggttttggagctttgcctccagccccagcgtctcaatgatccgttccacataggctttgtccggcgcgttgccgtccagctggatgggcaggacgatgttctcatacacgttcagcaccggcaccaggttgtagttctggaacacaaagccgatcttccgccgccggaagatggtcagttcctcatcgcgcatggcagagagttctttgccgtccaccgtgacggtgccgccggtggggcggtccagcccgcccagcatgtggagcagggtggacttgccggagccggaggtgcccaccaccgccacgaattcgcccttttccacggtcagatcgaccccgtccagggcccggacctccgtatcgccggagccatataccttccgcagatcctttgtttccaagatcgtcattgttcattcctccaaggaaaagtctgtattgccagaaggcaatacagacttcggctatctccataaacccggagggcttatttgacgggaaggaagatagctacgaaagactgcgcccgcaggcgcgattcagagcgcaaccgccgcaaagcggcggcacttagcgcggagataacccaggaggggtgtctttcgttttcaatcaatcgttttgagaactttaaaagttctaaaaacgcaagcagcttggcgaaaagactttttcgacaagctgagtctgtattgcctttcgacaatacagactgtaccaaagaaatctttccacattctttctgaaatctaacagttctgaaagatttgggatgtccgggccggaacgcgccgccttctacgtcctctcctccgccctcggcaggaacagggagaaggtgctcccctccccggggcggctgctgaccttcaggtatccgccctgaccggcggcgatctggcgggccagatacaagccgattcccacgccctccgcctcgctggcggagggggagcggtagaaccgctggaagatcctggcctgctcggactccgggatgccggggccggtgtccgtcacgtccacgcggcagaacagctcataccccacggcccggagggtgacggcgccgcctgccggggtgtatttcaccgcgttgtccaccagattatacagggcctccgctgtccacttggggtcgaaccgggcggtcaggtccgtgggctctaccgtcagggtgatcgctttggcctccgctccgggagcggcctgggccgaggcggcatccaacagctgttggatgccatgacgcttgggcgtcatggcaaggacgccgctctccagccgggaggttttgaccagcgcgtcgatgaggaaccgcagcttctccgcctgatgctccagagcggaggcatactcccggctctccggcggcaggtcctgctcctccagcagctgggcatacagcaggaggttggcgatgggagtcttggtctggtgggagatgtccccgatcagggtcttgatggcgtccttctcctccgccagatttttggccgatacggcggatgcggagagatagtgggccatccgggtctccagggcggagaggcggctctcgtcatagagggactcccggaactcgccccggatggcgtcatccagcatcttgcccagagtgtccagcatccggcgggtccgcaggcgggtccagacggcgaatcctgccgctgccagcagggccggaaccgccagggccagcagggtgtattccactgtcatgtcagttcaccgcccatgtgtagcccaggccgtacacggtcttgatatagcggggcttggacggcatgtcttccagcttgtcccgcagccgcttcactgtgacggagagggcgttttcgtccacatactccgccccgtccgtccagatccggtccaccagggcggcccgggtaagggtttggccccggtgctccaccagcagccgcagcagcttctgttccgtcttgctgagctccaccggaacgccgttccgggagaactccatccggccgaaatcgaaggtgaagccgtccagctgcacccgttccgcctggggggcggcggtccggcgcagctgagtattcaccctggcccgcagcaccgccagagagaagggcttggtgatatagtcatccgcccccagctccagacctgccacgatgtctgtctccaggtcattggcagtcaacaggattacgggaacctcactctcccgccggagggcacggaggaggtccagtccattgccgtcaggcaggttgatgtccaggatcagcaggtcgaagctccggcgggagagcagctccccggcatccgccagggaccggcagagctgggggcggagctccggcgcctggagggccaggcggataccctcgcccagagtcgggtcatcctccacgatcagcaggtctttcatcggggaacctccttgggatcaaactgcgcccagtataccacgggcggccgccgccgtccagagcgggcagaagaaacgcacggcggacaggccgccgtgcgtgggtcgcgggatcgcgggtcacagggtcagggagggggcggcataggtccgggccgccagctcctggtccagcatatagagccccttggggtccgagccgaacagctccatcttcttgatgagatcggtggcgttggtctcctcctcaccctgctccttcacgaaccagtccaaaaactgcatggtgcggaaatccctggcctcgtacgcggcttcatagatggcgtggatcagggaggtgacatactgctcgtgggcgagaccggccttcagggggtccatgttggctttcagctccgcatccggtttggcgacggcctccagcgttacgggcacgtcgttgttctggagatactggagcatcagcatggcgtggtcccgctcctcctgggcctggaccttgtaccagttggcaaaaccggcaaggccctgctccacatagaaattggagaactggagatacagatacgcagagtagaattccttgttcacctgatcgttcaacagctgggatactttttcgttcagcattgtatgcgcttcctttctgcagcggacgaaatgtccttgtttgttctatctaaccattatatcacggactgcagaaaatgcaacggcagccgggaaaaaagcggtggacgggcgggaggcgctgtgctacaatgggcgtgctgcaaagtccctttttgggaaaactttaacgggaaccaaacggcaggggccgcctttttacagaccggcgggcccatccgtgttatcatggtcctgctgtccacgggcggcttctgataaaacggaaagagggatcgctgtgttcatgcgcagaaaaaaccacatggcgccggcgcggatcatcctgatcggctttgcgctgctgattttggcgggagcactactgctgaccctgcccatctccacccgggacgggcagggcgccgcctttttcgacgcgctgttcaccgccacctccgccacctgcgtgacaggactggtggtccaggacacggcgctgtactggtccggcttcggccaggcggtgatcctcatgctgattcagattggcggcatgggtgtggtgaccgcggcggcggccatctccatgctggccgggcggcggatcgggctgaaggagcggtgggtgatgcaggagtccatctccgcaccccaggtggggggcatcgttcgccggacccgcttcattctggcggtgacgctggtcctggaggggacggggacgttgctgctggctctgcggttctgcccggagatggggctgttccggggactctggtacgcggtgtttcatgcggtgtcctccttctgcaacgccgggttcgacctgatgggggcggcgggcacgcccttcgtctccctgaccggctatgcggggacccactggtgaatttcaccgtgatggggctgattgtcctgggcggcatcggattcctcacctggggagacgtgcgggagcacaagtggcacctgcgggcctactgccttcagagcaagctggtgctggcggtgactgcggcactgatcctgctgccggcgctgttcttcctgctctatgagctccggctgccccagtggcagacgctgaccctgggggagaaggtccagggggcgctgtttcaggcggtcaccccccggaccgcagggtacaacaccctggacctctcccagctgagcgagccctcccggctgctgattacgctgctgatgctggtgggtggctcccccggctccacagccggcggattcaaggtcaccactctggcggtatttgtgctggcggcccgggcggtgttccgccggcgggcggatctccagtgcttcggccgccgcctccccacggagacactgcgcagcgccgcggcggtccttatgatgtatctggggctgtttctgctgggcggtatggccatctgctgcgtggaggacatctccctggaggcggcgctgtttgaaaccgcctccgccctcgggaccgtggggctgacgctgggggtgaccccgggattgggcggcgtctcccggttgattctgatctttttgatgtactttggccgcgtgggcggcctgacgctgatctacgccgtcctgccggacagcggcgccgccccggcgcagctgccccaggagcgggtcactgtgggctgagcggtacgcttgagaaaggacgtgtgaggatgaaatcggtactgctgatcggattgggccgcttcgggcggcacatggccgccaagcttcaggagctgcaccacgaggtgctggcggtggacaaaaacgaggagcgggtcaacgaggcgctggacctggtgacccacgcgcagatcggggacagcaccagcgaggcgttcatcgcctccctgggggtgcggaactttgacctgtgcgtggtggccattggagacgacttccagagctctctggagaccacggccctgctgaaggagcagggcgcacgcttcgtcctgtccagggcggcacgggatgtccacgccaaatttctgctgcgcaacggcgcggatgacgtggtttatccggagcgggagaccgccagctgggcggcggtgcggtacagctccgaccatatctttgactacatccagctgacgccggaccacgccatttacgagacggcggtgccgccggcctgggtgggcaagaccatcggccagctgggggtgcgccagcggcacaatatcaacatcctggccgccaagcggggagaggagctcatccccattccgggcggcgactactgcttccgggagggggagacgatgctggttctgggcgcggaccgggatgtacagaagttcctgcacttttgacgcagctgggcggagccgtctgttggcggctctgcctttttcacgccgggacggaaaaggccggtttgcattccctgtcgggtctggtataatggatgtatcacgcaagaaaagagcggaggcgaaggcatggcggagatcctggtggtggatgacgaagcggcgattgcggatctggtggaggtctgcctgaaaaatgagggctacacagtgtacaagtgcggcagcggggagacggcgctgacctgcgtggcgcggcagcatttggacctggccattctggacgtgatgctcccggacctggacggctttaccctgtgccagaagatccgggaggaacacctctttcccatcctcatgctcaccgcccgggtggaggacatggacaagatcatgggcctgaccctggggcggatgactacattaccaagccctttaatccgctggagctggtggcccgggtgaagacccagctgcggcgctatacccggtacaacaccggcgaggcggcggaacccagggagaccgcggagcatgacttccgggggctgcagatctccaggaccacgcataagtgcgttctcttcggcgaggagctggcgctgacgccgctggagtttgccattctctggtatctctgcgagcaccggggacaggtggtgcccagtgaggagctgtttgaggcggtgtggggcgagaagtacatggacagcaacaacacggtcatgagccacatcgcccgcctgcgggagaagatgcacgagccaagccggaagccgaagttcatcaagacggtctggggggtggggtataccattgaataagagaagagaacggcccccgctgtcggaccggggccgccgccgggccctgcggacctggggattctatctgctggcactgacggcctgggtgacggtggtgctggcggcggtcttcctggggtatctggtatgcagcgcctttacgtggtatgcgtgggatccgctctaccagttcctcaactgggtacgggattacatcgtctttgtgtgtatgctggtcatcctgctgggctgggtggctatcagctattccttcattgcccgccccatgcggctggtggacacgctggccgcggcggcagagcagctggcccagccgggagaggagcccattgagctgccggagcccatggaggatctggaggggcagctgaacgccgtccgggaacgggccctgcgggacgcccgggctgcccgggaggcagagcagcggaaaaacgatctggtggtctatctggcccatgatttgaagacgccgctcaccagcgtcatcggctaccttacgctgctgcgggacgagccgcagctctccccggagctgcggagccggtataccggcatcgccctggagaaggcggagcggctggaggacctcatcaatgagttctttgacatcacccgcttcagcctgacccatctggagctggagaagcagcctacggacctgacccggatgctggagcaggtggccagtgagtttgccccccagttcgcggaaaaggacctgcggtgtgaactggagctgccgccccgtctggcatacgactgcgacccggacaagctggcccgggtgttcgataacctgctgcgcaacgccttccattacagcttcccggggtccacagtccggatcaccggacagcaggaggcggataccgtggtcctgacgtttaccaacgaggggcggaccattccggcggagaagctggagcgcatcttcgaccagttcttccggctggacagctcccgcgccacccgcacgggcggcgcgggccttggcttggccatagccaaggaaatcattgccctccacggcgggacgatccgggctgccagcgcggacaaccggatcacctttaccgtccgcctgcccctgcagggggccgccgcaagaaattcgtaagatttccgcaggaaaatcacaggaggtttgcaggaacgtccacagatctgcgggaagcgaatctgatacgatctttccatcaggaaaggcgctgggcgccggaaaggacatgagatggaaagattgcggatattggtgctgttcggcggatgctcttcagagcatgaggtgtctctgcagtccgcccacggcgtgctgacgcacatggacccggagcggtactgccccatcccggtagggatcacccgggagggggcgtggtatgtttacacagggccgctggatgccattcccggtggaagatggcagcgggaggcggcgtgcgtgccctgcactctgcggctggaccgggggaaccaggccctggtgctgttggacggctccggccgggaagtggcttttgacttggccttcccggttctccacggcaggaacggtgaggacggcacggttcagggggcgctggaattggccggtgtgcccctggtaggctgcgggacgctgtccagcgccctgtgtatggacaaggaccgagcccacaagctggcggctctggcgggggtacgggtgccccggagccgtctcttcccggaggactgtgcctttgaggagctccggacggcagccgaaacactgggctggccgctgtttgtcaagccggtgcgggcgggttcttccttcggcgtgagccgggtggaggagccggcacagctggctccggcggtggaggcggccttccgccacgacggcgagattttgctggaggaggccattcccggctttgaggtgggctgtgcggtgctggggaaccgggagctcaccgtcggggcggtggatgaggtggagctgtcccggggcttcttcaactatacggagaaatacaccctccagacatcggccatccactgccccgcccggatcgccccgcaaaaggcagcggagatccgggagacggcgaaggtcctctaccgggcactgggctgccggggatttgccagggtggacctgttcctcaccccctggggggagattgtgttcaacgaggtgaacacgatcccgggcttcacgccccacagccgctatcctgccatgatgcgtgccgccggcatccccttccgggagctggtgagccgcctgatccagctgggggccgagctatgagggcggcgcggtacagccggcggcagatgcgctccgggccgctggtgctggtgaaccgtcagcatcccctggcggaggagccgcggcagctgctgacagcagcggacgagcggtatcccaatatcctgctggagcggcaggccgcccggctgctggccgcctgcatccaggcagcaggcggggcgcgggagatcgtgccggtctccggctggcgcagtcaggcggagcagcaggccatttgggaggacaccctgcaaagacggggagaggcgttcacccggcagtatgtggcggtccccgggtgcagcgagcaccagacggggcttgccatcgacctgggccgggcagcgcgggagatcgacttcatccggcccgattttccggaggaaggcgcctgcgggcggttccggcgactggcgccccggtatggcttcatccagcggtaccaccgggaaaaggagtccctgaccggtatcgcctgtgagccgtggcactatcggtatgtggggacgcctcatgccctgctgatggagcgggagggcctgtgcctggaggagtatctggactgggtgcagacagcgcccaggacgtgccgcctggaacatgggcggagcgcacgggtgttttacatgccctgcgccggcgatgagacggagctccgcttgccggagggctgctgccaggtctccggcgacaaccggaacggatttgtcgtgacagtttgggaggtgtaggtatggcagacggacgccggggcgcggcgttggatctcttccgtctggcggcggtgatgctggtggtggcgaaccacacctccccgctggtgtctgtttccccattgtgggacttctggttcacccgggtgctggcccgggtggcggtgccgtttttcctgatggtcagcggctattttctggcaaaggaccagtggcgcaggaccggcgtctttctgaaaaagacctgtctgctctacggggcggcggtgctgctgtatctgccgctgaactggtacaacggcggctatgggccagcggagtgggtcaaaaagctcctgctggatgggaccttctatcacctgtggtattttccaggcgtgattctgggtgttctagtggccagggggctgctccggctgggctcccggacggcgttgaccgcggccgggctcctttacctggtgggcctgggcggagacagctattatggactgacctgccagctcccggcgctggaggcgctgtacggggagattttccaaatctttgcctatacgcggaacggactgtttttcacgccgctatttttgctgctgggagccgccggtgtgcggtggagcgtgaggacctccgctgcaggcctgtgcgccgccttcgcggccatgaccgcagaggggctttggctccatgggcttcaggtccagcggcacgacagcatgtacatgctgctgccgctggtgatggtttgcctgttttcccttctgctggggctgaatcgcggagaaaggcggagctgccgcaagctctcttcactgatctatgtcctgcacccctggtgcatcgtgctggtccggggcggcgcggaggtgctgggcctggaaggtccgctggtggagaacagcatggggcatttcctggccgtgctggcctccagcgcggcggcgtcctgggcgctgtggctggcctggagcagacggccgctgaaacgctccaataaaggataaaaggacaatatattgtcgaacttcgacagtatattgtcctttttgggcctctcaggcgccttcgcgctccgcgtgaagacggcggagctgctgttcagctgtcatcataccctgctcgtaccggtcgattttctgattcagcaggtccagagaggcctgcatctccgccatccgggacaccagctggtcccgctgttctaccagcagggccttgcgggcgtccagggtggcgtctccctgctggaacaggtccacatattcgatcagggcttcgatctgcaccccggcggcccgcatgcacttcatcagctggatccagccgcaggactcctccccgtagtcccgcaggccgcccctggtgcgggggacaggcgggatcaggccgatgcgctcgtagtagcgaagggtgtccgctgaaatatcatacttcctgctcacttcggcgatggtcatggccgttctcctctcagcgggcggcctgggccgcgtcgttcacacaccgcagggcgttcaggctgcggggatagccgatgtagggcaggcactgggagatgacctggatcaggaaggcattgtcgtttccaatcctcagattggcaccggcgtggctggtgagctggggttcgcagccgcccagggcggccaggaagcagaaggtgatcatttcccgctgcttatagtccagcccccgcgggtgtagtagtcgccgaagcagttgtccgccagccagcggttgatgtggcggctttcctccgggccgctgttctgaaagccccgcatcccctcaccgaagatatccacctgggcctggttgcccgcggccagccgggtctctgccgtggtggtggagccgggctccagcggcagggcgacgccctgctccgtcagcacctgattcgtcacggagaaaaagggacgcacccggccgatccccagataggccacggattgatagagaatctcctttacctggacaggggtgatgccggcccgcagggcggcgggcagcagcacgcggtattcctccacaccctggcagcccagtagggcagcgagaatggccatcatcctggcggcgtcatccaggtccccctggttcaccacctcgtccagggcgaaattggcgaagagctccataaactccggatccgtttcccacagcggggaaggagggccgggaaagaaacgggacaaatagtctttggcagatgcggaaagcgccatactgaaaagcctcctttgcgcctgcggggcgctgtcttttgatgagaacactttagcacttggagtctactccaagtcaagtgctttttcaaatactccgcaggggaatcaatcctcaatatgatacagagaggatatgaccagccagagctgggagaaggggcgcatcaggttccagatgccggcaccctggaaaccgtattccgcgatcagggacagacgggcggaaagactgcgggcgtcttcaaaccagacttcgtgaattgtgccgtctgctgcggtgtagtgaaagaagggggcctgggccgtctcatcgtactggatggccacgtcatgttcaatggccagctcgatggcccgctgattggagatggagggcgcccgggtgacgccctggacaaagggcaggggccaatcgtagccgtagttggaaaggcccaagaagatcttctccggcgggatctccgtcacggcgtagtccagcacggtccggacgttgggcaggggggataccgccatgggcggtcctgcggtgtagccccactcataggtcatcagaagcacgccgtccacagcggcacccacagcggcatagtcgtgcccctcgtacagaagtcccgcctgccgggcggaggtcttgggggctagagcggcccagagaaagaagccctgggagttcaggagccgccgcaggcgggcgagaaaggcggcgtaggccgccgccagctggccggggagaaattcaaagtccacatccagcccggcgtagccacggcggcggagtgtctgctggacctgatccactaggcggtcctggacggcgctgtctgtcaggaccagggtggcccgctgggtgtcgaactgaccggtttctgtcatggtggacagatgcatcaccgggcggacgccccgctgacgggcagcggagaggagagcgtcatcctccagctggagcaaatcgccgtcggcggtgatcccgtaggtgaaaggggtcagataggtgagatagggaagctccgcattcagaagggacatatcaatgtaggggtaggcataaccgttgaaggcggcggcgcccaggggctcgtcaaagtaggagatcaccaggacctgtccgggctggagggctgctccgccgcccagaggccagttgttctgccagaggcggcggactgtggtgccgtatgcctccgcgatggaagccagggtctccccggcccggacagcgtggacctggcggggaaagcggaccaccagagtttgtcccaccgccagggcgccgctggggggcacggcgttgtccgcggccaggcgggcgggatcgacgccgtaggattccgcgatggagccgaccgtctcgccggcttggaccacatggatcgtcatgttggacatcacctcctttggagactatgcaggccggggtggggatatgcggtgcccactggagggagttggaaaatatgacggaagagacggctgcttgacagagcacatttggaagaattgtgacgctttgtcagaacgccgaaatttgattcagagatttgtggatattttccggcgtgccaggagggtcaaaaccgctgaaatagttgacagagacgtggagaatcgttaaaataatgttaaagcttgtgcgttttttaacgaaaaacgggtagacgatgacgtccaacaagcgtgtgccatccgccgttgagggaggaaacacaccacttgctgagacgtctctttttgtatacagcgcaaagagggaggcaaagcgatgttcctgctgtttttcctgctgtggctgttgctgtccggcgggatcagtgtccatacctgcctgtggggcgttgcagtctcggcgctgatctcctggttctgcaagcgggtgctgggctatcagtggcgggtgttctgcggcagtccttccagaatctgggccatggcgcggtattttgctcacctgctggcggagatgctgaaggccggactggtaatcatgcggatcatctacacccgccccaagggcatcgaacccaagctggtgtggttccacaccccgctgaagacagaccgccgcagggcaatgctggcagactcgatcacgctcaccgcggggacaatcaccgtgcgggccgaggacggccggatgctggtgcacacactggacacgccgctggcagaggggattgaggacagttccttccagcagcggctggagaggatggaggcggcccaatggaacaagtgaggacctgggtgctgaccgcgggcgccgtggtgctggcgctgctgatcctggcgacgctggtgcgggcggtgctgggcccccggtttacggaccgcatcgtggccgtgaatgtcatcagtacgctggtgatcgcggagctggtgctgctctccgtctggctgcgggaggactttctggtggatgtggccctggtgttcgcgctgctgagctttctggcggtggtggtggtctcccgtctggtggcggcccggcggcggaaacgcccggagcgggagaagacgggaggaaacgcccatgatcgataatctggtgaccgcagccgggctggcatgtttcctgttcggcctgttcgtgtttttctccgctgtgctggggctgttccggttcgattatgtgctcaaccggatgcacgccgccgcagtgggggactccctgggtatcttctgcgttctgatcgggctgatgctgctgcacggctggtccctgtccgccgcaaagacgctgctgatctttgtgtttttatggctgaccagtccggtgtgcagccatctggtcgcggagatggaggtatccacagtcccggatttggaaaaggaatgcgaggtggaggtacgatgatcgttctggaatacatcctgctggtcggggtgatcgtgtgtgctattgcagcgccgctgtgcaagcggctgctggcatcggtaatcgtgtatatggcgctgtccctgatgatggcggtgctgtggagcctgctccagagcccggatctggccattacggaggcggctgtgggcgccggtgtgaccagcatcctctttttcctgacgctgaagaagatccacgcgctgaaggggacacgggatgagtaaaaaagaggagcagccggaccggctgaaacagtttatctcctgggtggacggagatcgggagcccaaggaccggacactgttcgtcatggagcagcgcccccaccgggaattccgcccgtcagaggaggagttcgagcggcgggaaaaggaccggctgcggaagtttttcaactggtatcccatcgccgcggcggtgatctgcgtggcgctgggaattatcctgttcaccacagtgatgaacatgcccggattcggccaggaagacaaccccatcaacaacgaggtggcggagcgatatctggagcacagcgaagaggagacgggctctgagaacgtggtgacggccatgattatcggctaccgcggcttcgatactttgggggagagctgcgtgctgtttctggcggtgtcggcggtgatgatcctgctgttgcgggaccggaagaacaccagcgagcatgagctccagcagatggagcgggaggagaccgccgtgcagggccgctctgacctgatcctcaagcaggtggcctgggtgctgcttccttttattttcctttttgccatctatgtgctgctgaacggcgagacgtcgccgggcggcgggttttccggcgggactatcctgggggcgggactgatcctgttttccgctgcctttggccccggacacacgcgggtgctgatgaaccagaggcggtacagcgcggtgcggaccttcggtctgctgctgtatgctgtgctgtacggcgtttacatcttcatcggggccaacggcctgcccaattacctcaccgggatgatcctgctgatcgacctggcggtggggctggtggtggcctgcaccgtatatggattctacgccctgttttccaggggagagatctgagaggaggcggagaagagaatgctggaggagatcatccagaaccgctacgcggtcactgctgtcatcctgtttggcatcggcttcacgaatctgatgctgcagcagaatctgctgcgcaaggtgatcggattcaacatcatggactcggccgtcttcctgctgctggcctcgctggggtatattgacgggggcgtcgcgcccatcgtgggggaccggggcttcgacccgctgtacatcaatccgattcccagcggcctggtgctgaccggcattgtggtatctgtgtccatcacggcgttttccctggcgttgatccagcggatctaccgccgctatggcaccattgagatgcgggaactgctggagcgggccaagaaggaggacgactgatgcggccgtttgtggagaactttcccttcttttcgatttttctggctatcctggcggccatcgtgaccgcggccatccgcagcgggcggatcagctactggatcaccatcggagtgtgcgctgcatccgcgctgctgaacggctgggtactggaatacacctatgcagagggagtgagcttcacctacgccatggggcgatttctggcgccgtacggcaacgccatcaactgcgggccgcttcaggcactgctggccgccgtgttctccctggtgatggcccttgctctggcgggcgggcggcgggacctgtttcaggacatcctgccggagaagcagaagttttactttgtcatggtgaacatgctggaggcgtccctgttggcactgacctacaccaacgacatgttcaccgggtatgtgttcatcgagaccagcaccatcgcggcctgcgcgctggtgatggccaaggacaacggccccaatctgatcgccaccatccggtacctgttcatgagcctggtggggtccgggctgttcctgatcgggctgaccattttgaacagcatcaccggctatctgctgatgccctctctggcggaggcagtggcggagctgcggctctcggagagctacacgctcccgctgacggtggctgtagggctgctggtggcgggactgggcgtcaagagcgccatgttccccttccacctgtggctgccggatgcccacggcggcgccaccacagcgtcctccgccatcttgtccggcttggtgctgaaggggtacatcgtgctgctgctggtgatgatcctgcgggttttctccatggagctgatggtggagctgggagtcaccgacgtgatcctggcctttgggctgctgggaatgattctgggctctctggctgctatgcgggagaaccatatcaagcggatgctggcgtattcctccgtggcgcaggtggggtatatcttcatgggtgtgggcctggggagcatcgaggggctgatcgcctcctgtttccatatcctggtccatgcctgctgcaagccgctgctgtttctctgcgccggcagactctccgccgtcagcggccaccacaagagcctgaagaacctgcggggcagcgcctaccgggacattggggcgggcttgggcttcactgtgggggccctgtccatgatcggcatccccctgttcggcggctttgtctccaagctctactttgccagcgcggccgtgcccaccggtatgacggcgatgatcctgctgaccatcgccctgtccacggtgctgaacgcactgtactatgttccggcgctgctggccatctgggtgaagcccccggcggaggatgaggcgctggtcctagccgacgtgcatccgggggatctggctgcggaccgggccttcaccgcggctgccgccatcctgatcgtgggaatttttgtgctgggcattttttaccacccgatcacagacctgatcgaggcgggtgtccggctgatttgagacttgttgtttgtgagggagtgcgcccatgctgttgctgctgcctattctggtgccgctgatcggcgggatcttcgtattccggcagaaaaatgagacttaccgtgactggctggtggtgacgctgatcgtgattaccgccgtgatggtgctggctaactgcacgatgcccacccagcggctgtggctgctgaccatccagggggacttgggcttggtgctgaacagcgactggctgtccaagttcttcatggtgctggcagtgtgcatctgggcgccggtggtggtctttacaaaaccctacatccgccatgcggggcagggcaatcagttcatgggattttataccatgacgctgggggtactgatgggccttgctcaggcggccaacttcgtgaccatgtatatgttcttcgagatgatgtccctgattacggtgccgctggtgctgcacaatgccacgccggcggcccgccgggcaggcttcaaatacttggggtattccgtattcggcgcgggcatggccctggccggctacttctttatcgcctattacttgacggtgccggattttcagccgggtggggccatcgatttctcccgggctgcagagcaccagccgctgctgctggtggcatactgtctgatgatcgttggcttcggggccaaggcgggcatgatgcccatgcagtcctggctgcctgccgcccatccggtggcgccggccccagcctcagccgtgctctccggtgtcattaccaagggtggcgtggtggctgtgatccgggttacttattatatgtttggaccggagtttctggcgggcagctggccccaatatgtgctgctgacgctgacgctggccacggtgttcgtggggtccatgttggcctatcgggaaaagcagctgaagcggcggctggcctattccacggtgagccaagtgtcctatgtgctgttcggcctgatgctgctgacgccggatggcgtccaggcctctcttctgcagatggtcttccatgccctggccaaggatacgctcttcctggcggcgggcgccatcatcttctccaccaactgcacccgggtggatcaactgcggggcatcggccggcggatgccggtaaccatgtggtgcttcaccctggcggccctctccctgatcgggattccgcccatggcgggattcgtgagcaagtggtacctgctcaccgccagcctggaggcaccgatccaggcctttggcgtcgcagggctggtggtgctggtggtctccgccctgctgacggcgggatacctgctgccggtggtgacagagggattcttccccggccgggattttattacggagcggcgggaagtgggagtccagatgacatggcccatgattgcctttgccgcggctgtggtgctgatgggtctgctgcccggcggcctgctgcattggctgggtcttctggcggcccggctgttcccctgacagtggggaagctttgagaagggaggtacgtctgtgcgccaatttctgacattgcccattctggttcccatcgtgctgggaatcgcgctgctgatcctgcagcccaagagccggagggtgcggagcatctatatcatggcggcatccctggcgacgacagcactgtctctggcctgtatcgtgctgacctatctctatgggagcggctttctggcctgtatcatggtgagattcaacgaggcgttctccatctccctgcggatcgacggggcgtccatggtctatggggccatcgtgtccgtgctgtggccgctggtgacggcgtactcgctggactatatgtcccacgaggggcatgagaaccggttcttcgctttttggctgatggcctacggtgtggtgctgggtatcgcttattccgaggattttctgacgctgtatttcttctatgaggtcctgacgctgaccacgctgcctttggtgatgcacgccatggacgagaaggcccggtatgccgggcggaagtatctggtgtactccctttccggcgcggcgtttgcctttatcgggatcgtctttctgctgaattacggcgtgggacacctgaacttcacctacggcggcattctggatcagagtctggcggcgggaaacgagcggacgctggagctggtgtttgtggcggcctttttcggcttcggggtgaaggcggcagtatttcccttccacggctggctgccggacgcctcggtggcacctacgccggtgtctgcactgctccatgcagtggcggtggtcaaggccggcgccttcgcagtgctgcggctaatttactacggcttcggggcggatttcctgcggggaagctgggcccagacggtggtgatgacggcggctatcgtgaccattgtttacggctccgctcgggcgctgcggacaccccatctgaagcggcggctggcgttttccacggtgagcaacctttcctacatcctctttgccctgacgttgatgaccccggcagggatggtgggcggcatgacccacatggtctaccacgcattcaccaagatcaccatgttctgctgcgccggcgccattattctcaagagcgggaaggagtatatctatgagatggaggacttcggccgggccatgccggtggtgtttgccacattcaccgtctcctcctttgcgctgatcggaatgccgccgttgggaggcttcgcaggcaagtggatgattgcggaggcggcagtggcctcggtgaatccgctggcctacgcgggcatcgccgcgctgattctgtccacgctgctgacgacgctgtacatgctgactattgtggtgcgggcctatttcccggtgggagagctggaccgtgcggcactggcccgggtacacgacccggccaggaccatgtggatcccgctggtgctgctgaccgcctccggtgtgattctggcgctgctgtccaacgaagtgatcggctttttatggaacgcggttccgcggaactggtaagggagggagacgatgggaaacattctgctgctgtttctggtcctgttccccatgctgctctctgcctgggtgttcccgctgcggcggcgggacaggagataccggaattggctgatccagatcattcccgcagtggagctggccgctgcactgctgcttctgctgtggcccggggctgccctggagctgccgggggtctttggctttggcctgcggcttcaggccgggagtctggggagcctgctggcgctggtgagcgccttcctgtgggcggccaccggcctcaactgccccagctactttgccgccgccgagggctgtaatcgtttctactttttctggctgttgacgctgggggctctgatgggggtgtttctggcagcggacctgttcacgctgttcgtgttctttgagatgatgtccttcacctcctatgtatgggtggtgcaaaacgagacggaggaggcccggcaggccggacagacgtatctggctgtggctgtgatcggcggcatggcgctgctggcgggcctgctgctcctccagcagctgctggggacgctggagttttctgctatggcggaggcggtatccgcgctgcctgcggagaagcgcgggtccctgtacgtggccggtggatgcgcattggtgggatttggcgccaaggccgggatgttccccctgcacatctggctgccaaaagcccatcccgtggcgccggcaccggcgtctgccctgctgtccggcatcctgaccaagagcggtgttttcggtgtgctcattctctgccggtatctgttctggacagagcttccctggaatacagtggtactggccctgggcgtggtgaccatggtgctgggagctgtgctggcgctgttctccgtcgatttgaagcggacgctggcctgctcctccatgtcccagatcggctttattctggtgggcacagccatgcagggcttcctgaacggcgagaacgccctggcggcctggggcacggtgctgcacatgctgaaccactccctcatcaagctggtgttgtttgtggcggcaggtgtggtgtatctgggaactcactcgctgaatctcaatgacatccggggctgggggcggaacaagccggttttgaaggtcctgttcttcgtgggggcggcctccattgcaggcgtaccgggtttttccggctatgtgagcaagaccttgctccatgagagcatcgtggagtacatccatgtgctggagcacgcgggggccgccgcaggttggttcacgacggtggagtggctgtttctgctctccggcggactgacagcggcgtacatgacaaagctgttcgtggcgatttttgtctccagccgtgctgttggccaacggccggccttgaaggactatatgtcccgggcacccatgcggcgttgagtgtgggcgcagccctgctgctggtgctgggcctgactccgggactgaccatggagcctctggcccaatgggcggggcgattcctgcgggcagatcctggtcacagcgtccattattttgcctgggtcaacctgaagggcgcatgcatctccctagctattggcgcagcagtctatctcctggtggtccgagggctgctgatgcggcgggaggcggatggcatggtttatctggaccgctggccggcccggctggatttggagaatctggtataccgcccgctgctgtcggccctgacctttgtgggggccctctgcgcccgggtggccgcctccgtaggcgactggctggtgctgctgggggagcggatcctctttaccaaggcccccggcatctttgtgccgaagcgggccgagaacttcggcacatacggacggaaacccctccgtttcctaacggaagagaccttctcctttgatctcatgctggcaggcggagggctgatcttcctgctgctgtatatgctgctgtgagtcgacaacggatacagaagaacgcgaaaggccaggaatgccgcttatgcggtgttcctggcccatctttatgggagggagagaagattgtgggtacgatcatagctgtcacggccgcggcaggcatgggagggaccgggctggggggcctggccgcctatctgttccgcagaggtacggacaggaccgtgagtgtgctgctgagctttgcggcgggcatgatgcttgctgtggtgtgtgcagacctgctgaccgatgccattcaggcggggccagggctctccgcgcttcctgcggcatctgccagcgtactggcgggctgcggggggatctggctcctggaggagctggtaagcgggctgcaggcaggtgcgaagcggggagggctctttctggcaggtgtggtgatggcagccgctattgccctgcacaacctgccagaggggatggtaatcggcgcctcctacgctgcggatctggccgaagcgggagaggatgggcgaatgatggcactggtgatcgggctccacaacattccagagggaatggctgttgcagttcccctggcggcaggcggtgccagcagaggacgggcagtcctgaccacagcggtagccggcgcgcccacggtgctgggggcggttttgggcttctgcctgggaacgatggggccgggcctgcagatgctcacactgggcggagcatccggggcgatgctgtacgtggtattcggtgaactgctgccggagtccttccgcctgtgccgatccccagcgcccgtgatggcggcggtgctgggggttctaacaggcatgggcgtggttttgggataaaaagaacccgtcccgccacttggcgggacgggtttgtttcagaaaatagttacagcttacagcttctggagccgggcagcgcgcttcttgccgtaccagacaatgatagcaacgtaagccacagcagcgcagacaccgatgatgtaggcgggcgtccagggaatatggaagccgatctgtgcattggcaatgaaggtcactgtaacaaaggtgtaccaagcaccgggaatcagggggatccacacccacttggccttgctgttctcgaacatccatacggagatacccaggaatgcgaacagggacagggtctggttggaccatgcgaagtaacgccacagcagattgaatccatcggggctgctcttcgcaaagaccagaatcaccgccaccagcgcgaagatgatggcggacaggcccaagcgcttcggcttagagctctgatcgatgtgcagagagtcagagatggacaggcgcagagaacgcagcgcggtatcgccggaggtgatgggcagaacgatgacgcccagcagggcgatgatgccgcccacggggcccagcagatcgcggcagatgatgccgacagtgccggtggccagagaggcattgacctcctgcagacccaggttgtacacgcccatagcggcggcggcccagatcatggcaatgaagccttccagaatcatcatattgtagaaggtcatgcggccctgcttctcgctcttcatggtgcgggagatgatagcggtctgcgtggaatggaagccggagagaatgccgcaggccacagtgatgaagaacacaggaatgaagtgctgcgcggtgaaatactcaccataattgaaggtggcgctctgccagttgtcccacaggttcagcaggggatagcccttgacgaacatgccgatgaacacacccacggcagacagcagcaggatagcaccgaagatgggatagatgcggccgatgatggcatcgatggggaacacggtggcgatcagataataaacgaagatgacaccgtaaatcacccaggtggagacagaggtggcagcaccgtcaaaaccaaacacctgagtggcggcgatgtcgccgggggtgtagatgaacaccgcgccgaccagcagcagcagtacgctcaggaaaatctggtaaacagtgaaaacacccttgttggagtacttgcggaccatgtccggcatctgggtgccgccgtcgcggaggcagatcatgccggagaaatagtcgtgcatagcgccgccgattacgttgccgatggggatggtgatgaatgcgatgggcccgaacaggatgccctgaatgggtccgatgatggggccggtgcctgcgatattcagcaggttgatgaggctgttcttccattcccgcatgggaacgtagtccacgccgtcctgcttggaataggcgggcgtctcccggtcatcggggccgaagaccttttcgcagaacttgccatagatggctgcgcctacgaacagaatcaccaggccgatgagaaaggttgccatagaaaacacacactcctttatgcccagtttcccggacagattctggctttatcatagcactgaagaaaggagttgtaaataatttattcatatttataaagaatttgttaatatcgcagagaaaacaattaaaaattcgtttacctcacctaacaaagttccaaaatttttgtcccttttcaagataagtgttgctatgtataatcgtgaataaaatttgaaatacgtgaataaatagtcacatctgcacgaggataccctttgaaacagggtatcctcttttcatttggctttgtggtcagaagaaatataaatttcaaatcaaaggattgggaggtgcagatacattgccactaattcgctaaatatgatatactttcacaaagagctattgtgcatggaggagttcaaatggataatttatttgacttgaacattgaaaaagttcttgagcattggggtgttgagcatgcaattcgagaaataattgccaatgctttggacgaaatgactttaacagggacgaaagaaatcgagatttcttattctgatggtgtgtgtcatattagagactacggacgcgggttgcaatacatacattttactcagaatgaaaacaaagaaaaacttgttgcaactaacttgattggtaaatttggcgtgggattgaaagacgcacttggcgtattttacagaaaccatatcggagttacaatccattccaaatactcaactatatctcttactatggctgaaaaggcaggatttgacatacaaactttgcacgcagtcttttttgaacccaagtatcctacaatggtaggcacagatgtagtgcttactggtgtaaaacaagctgacctgcaaaaagcgaaatctatgtttttggtatttaatagtgatttggaacttttggaaaaaacaaattatggcgaagtatatacaaataaaggtgatggtaagtctttcatatatgccaacggtgtccaaatagcttcagaagataatttcctatttagctacaatattacaagcatgaatgcgcaaatgaagaaagctctaaaccgtgaaagatcaaatttggggcgtactgcttattcggaaacaataaaaaatattttgaagaactgcgtttctaccaaagtcatgcgaccgctcgttgccgacatagggaatgtaatgactggggcaaataaagacgaaacaggatgggttgatattgcagcctatgcagcgaagactctaaacaaatccggaaatgtagtttttatgacaccatctgagcgggcacaacttacaaatgatcaagtcgagatattagcgcacagcggaagagaactcatcatggtaactgatgcagtattcgggaaaatatcagatgttgttaatacatttaagactgtatccgatgaatataggcagggatacaaatacagatttattgagtacaaaaacttaacaggtgatgaaaaagaaacttttgaccttgtaacaccaattactgaactcgttaataagaaatacaggagaaagataccaagcattaaaatttccgagactattcgtatggatgaatttggctttgtaactcatggcatatgggatccggcagagaatgctataatcatcaagagaagtattttgaagtctaaagaaacatttgccggcgtgcttatgcacgaatttgcacattatgtatctggttatgcagataacacacgagattttgaaaatgtgcttacagagatgcttggctttgtctatagcgagttaagtattaagggggagaaaccaaagaaggttggtttgttcaaaagatggtaaatagtgagaggggcaggaaccattatggttcctgcctcttattatgtcttctgatgaataaatctacattgaagttggctacccaagcagtagcaacaattaacttaaaagggagaaattttttaaggaccggatgtgaacacgaatatttgtgctggacggacctgaaaatatgcgggagttcaggcagtaaaaaacccgtcccgccttttggcgggacgggtttgattttggaagacactgcagcttacagcttctggagccgggcagcgcgcttcttgccgtaccagacaacgatgccaacataggccacagcagcgcagacaccgataatgtaagcgggcgtccagggaatatggaagccgatctgcgcgttggcgatgtaggtcactgtgacgaaggtgtaccaggcagcggggatcagggggatccacacccacttggccttgctgttctcgaacatccacacagagatgccaaggaatgcgaacagggacagggtctggttggaccatgcgaagtaacgccatagggtgttgaagccgctggggctgctctttgcgaagaccaggatcacagccaccagcgcaaagatgatggcggacaggcccaggcgcttggccttggagctctggtcgatgtgcagggactcagaaacagacaggcgcagggagcgcagcgcggtatcgccggaggtgatgggcagaacaataacgcccagcagagcgatgatgccgcccacaggccccaggatatccttgcagatcacgccgatggtgccggtagccagagaggcattgacctcctgcaggcccaggttgtacacacccatggcggcggcggcccagatcatggcgatgaagccctcgaggaccatcatattgtagaaggtcatgcggccctgccgctcgctcttcatggtgcgggagatgatagcggtctgcgtggagtggaagccggagagaatgccgcaggccacggtgatgaagaagatggggatgaagtggttggcgtcaaagtactgaccatagctgaaggccgcctgctcaccggtggctgcatcaacagcccacgcgtcgaacgcgatgccatgccagtcatcccacaggttcagcaggggatagcccttgacgaacaggccgatgaacacacccacggcggagaacagcaggatggcgccgaagatgggataaatgcggccgatgatggcgtcgatggggaacacggtggcaatcagatagtagacgaagataacaccgtagatgatccaggtggtgggatcattcaccgcgccggagaagccgaagacctgggtggcggcgatgtcgccgggggtatagatgaacaccgcgccgaccagcagcagcaacacgctcaggaagatgttatagacggtaaagacacccttgttggagtatctgcggaccatgtccggcatctgggtgccgccgtcgcggaggcagatcatgccggagaaatagtcgtgcatagcgccgccgattacgttgccgatggggatggtgatgaatgcgatgggcccgaacaggatgccctgaatgggtccgatgatggggccggtgcctgcgatattcagcaggttgatgaggctgttcttccatccccgcatgggaacgtagtccacgccgtcctgcttggaataagcgggcgtctcccggtcatcggggccgaagaccttttcgcagaacttgccatagatggctgcgcctacgaacaagaccacgaggccgatcaagaaagttgccataaaaacacacactccttttccttaacccgcggccaggtcctcgatttggacacgcgggcttctggctataagcatagcagatttttggccgcataagcgttaaaaaatagttcacggaaattaagatgtcgctaagaaaacgacagccttatcaagaatgcgcttacttttggggagcgatgcacaaaaagcgcatgaagaagcccggttgggagctcttcatgcgcctgtgcggacggcggagcggatcagctgccctccgccatgcggtagccgacgcccatctctgtgaagagatactccggctcggcgggatttttttcgatcttccggcggatgttggccatgtttacccggagaatctggttgtcgccgctggcccgggggccccacagctccttgatgatgaaatcatacgtcagaaccttgccagcgtatttgcccagcagggccacgatgcggaactcgctgagggtgaggtggacattctcaccgcggacacggacctggtgcttattgtagtcgatgaccagttctcccactgtataggtgccgttccgggcgatttcgtcattaccggagatggtgcgggtgtggcggatcgcggtgcggacccgggccaggagttcgtccgtgccgaagggcttggtgaggtagtcatccgcccccagatccaatgcggcgaccttgtcccgctcatgggagcgggcggagaccaccaccaccggcaggctggaccagctgcgcaggctgcggaggatgtccagaccatccatgtccggcaggccgaggtccagaatgaccaggtcgggacagtgggaggagatcatggaaagcgcctcctcgccggtctgggcctgcatggcttcatagccgttgttgttgaggaccgtggaaatgaagtgcgagatgctcttctcgtcctcaattaccagaattttttcacgaatcgtcatgatacttcctccttagtgagcggcaggcagaaggaaaattccgccccggactccagattttttgcttccaatgtgccgccgtgggcacggatgatagccatgcagaccgataggcccaaccccatgttccgctttccgtcgccgggggacgagtcctcacagcgaagcgcaccgctgaacagggtgtgcagtttctgggggggaatgccctggccgttgtcctgcacgtaaaagcgggcccaggggccatcccgctgcgcggacagggcgatgtgcgtggtggttccgccgtggaacacggcgttctccatcagattggacaggacctgcatgatgaggatggcgtccatggggaccaggagcagctcatccggcacgtggacctccacggacacggcgggaaaccgttttcggaatttgcggaccgcctcgtccaggacttcctccgcagcctccggctccttggtgattttggccgattcgttgccgatccgggtgatggagagcagattttccaccacgcggatgagccactgggcgtcatcccgcacatccaccagaagggactgctgttcggccggggagagggcgggattttccaaaatggcggaggtggcacccatgatagaggtcagaggggtgcgaatgtcgtgggagacggagcggagcagatccgcccgcatcttcaccttttcgttttccatccggaggcggtcctgctccttggtcttggtggtcagggtgctggtgaccagcgagaccaccagaaaggtgaacattgtcagcggatagccggaaatggtgaagttaaacgccatatagggatatgtaaacacatagttgacgccgatgacacccagcaccgccgcaatcagcccgaagagatatccgctggtgaagcgggagatcaggagcacggccagcacatagaccggagaggcaaagccgtcgatggtgtccgccgtctggtgcagaagggcgcaggcccccgtggcgcatagaagaatggcggcggagaccagaaggtcgcgccaggagaaggaaaaggtacgcttcaaactggaacgggtgatcttcacagcaggtcctccttacatctgtggggcttgaaacattattatagcagaaagaggtgttaagattccactaaaaaacgttaaagaacataggcgggaaacctgtggatttttgcatacgtttaacaagccccaaatggaccttgtcagcggttgaacgacggaatgcgtataataatggatggcagggagctgccgaaaaacaaaaggagtgtgtatcagtatggaggaaagactcaaaacatatctgcggccgggagagcaggtccgctggcagggccgtcccgccccgttttcgcttctggaggcagaggcaaaaaagcagatcctgctgaagtggggactgacggtggcactgggcggcgggctgctggccgtgtatctttccgggaccgaggcgcccagtatgggatttatcggcctggtgctgctggtggctgcggtgattctgatctcgcccgtggcggagcgccggaacctcatgggggagcagtattggatcaccaaccagcgggccattctgatgacccgggacaagacgtttttctacatggaactgtctgacatcgacgatcttcaggtagtgggtggaaccacaaagggaaagagcttggttctgggcagatgcctgtttgaggaggccaagaagctgctccgctggcgggcctgccatcccaaggtcgacgtccagagccatgacgagacggaccgggccctggggatgattttctatggcgtccagggagccgaagcggcggcggagctgctgcgacagggcagagacggcgaggcagcctgaccggctccaaccggcggctcacccagccatacaattgaatctggagcgcaacacgctgtaccgcggggatctcctgcccgcggtacagcgtttttttattattaagtcaaaagagatgcccggcggcgtgcaacttttggccggaaggcggttattatcgaacgactgagaaaggaggtacgcgtccttggagaaattgaaggggcaggccgaagcattctgccggaagtatctccagtgcatggacccggaccaggcagcggcaatggctggctgcgccgatggatacgccgtgctggagacgaagatggtgcgcaggcggctggagcggatgcgggaggcagcggctgggcaggtgcaccgggaggatgtggtacggcgtctggcccagctggctttcggccgggtgaatgatgcggcgcggctggccctgcacagcgaagaggcggatttggagacgctggatctgtctgccgtggcggagctgaaggtgacggacaagggcggcgtggaagtgaagcttattgaccgcatccgggctctggaggctctgtacggactcctgagcgaggaaaaggcggagggggccggagagctgtaccgggtgctgacggaagctgccggggaggaaggagggtgggacgacggctgagatcatgcggttttcccaaaagcagcgaagggtgctgacctggtggtgccgcccgggagattgggaggccatcatctgcgacggggccgtccgcagcggcaagaccttctccatggggctctccttcttcctctgggccatggccaggttcaacggacggcagctgggactgtgcggaaagaccatcacctccctgcggcggaacctgctggcggagctggtgccctatctgcggcggctgggcttcgactgctgggagcggcggtcggagaacctgctgaccgtgcggctggggggccatgaaaaccatttcctgctctttggcgggcgggacgagtccagcgcggcgctgatccagggcagcaccctggcgggggtgctgctggacgaggcggccctgatgccccggagctttgtggagcaggccgtcgcccggtgcagcgtggcggggagccgcctgtggttcaactgcaatccggagaaccctcagcactggttttaccgagagtggattttgagggcgcgggaacggcgggccctgtaccttcatttcaccatggaggacaaccccgccctgtcgccccggatccgggcccgctatcgcagcgcctactccggcgttttttaccggcgattcgtgctgggggagtggacagccgcccaggggcgggtgtacgacttcttcgaccgggaccgggacagcgtgcctgtgccggagggagattttcaggagtggcggatttctgtggattacggcaccgccaacccggcctccttcggcctgtggggccggcagggagagatctggtaccgggtgggagagttctactacgactcccgccgggagggacggcagaagaccgacgcagagtatgtccgggacctgcgggagctggcggagggcagggagatcacaagggtgatcgtggacccgtcggcggcaagtttcatcgaggcgctgcggcgggagggattccgggtggtccgggcggacaacgatgtggccgacggcatccgggtgacggcggacctgctgaagcggcggcggatcatgatctgcggcgcttgcgccgactgcctgcgggagatggaaacgtactgctgggacgacaaggggcggcgggacgctccgaaaaaggagcaggaccacgccatggacgatctgcggtacttcgctatggatctggcggcggaagagcagaatggctttgcggccacctgggtggagagacgggcctgagggaccgcggtaaggaatggacgggaggtttggaagttgaagtggtttcggaaacagacggcgccggcgggagcgtcggtccagctgcgggagacgggataccacccatttggactgctggggcagtatgtgcccatgcgcagtggggagatccggctgtaccgggcagtacgggaggcggtgccggtggtggacgccgccatctacaagctgatccggatggtgggcggtgtgacggcggcctgttccgacccggcggcagagcgggggctgggggaattcctccgcacggtcccggctggacgggggcagtatggggtcgatgcctttctggagggctacctggacgctctgctgacctgcgggcgagccatcggggagatcgtgcccgcagcaggaaaccgggagattgcggccgtgctgtggggccgggtggaggatattgagattcgggagggagaccatcccctggcatttacaatctgcggccccgacgagcaggggcggatggggccgctgccctgtcaggacttgctgctgttcacgcctctgaatcctgaggcggacagcccctatggcgtgtcccttctgcgggggctcccgtttttgacggatatcctgatgaagatctaccacaccatcgggattaactgggagcgatgcggcagcctgcgcttcgccgtcacctgccgggacgacggaaacggccaagcggaggagcggagccggatgctggcaggagagtggtcccgggccatgcaggataccaggagcggcagcgtgcgggactttgtggctgtgggagatgtggatatccaggtcatcggcgctgacgcgcccgtcctggacagcgaggtgccggtgcggcagattttggaacaggtggtggccaagacggggatcccgccctttatgctgggactgagctggagctccacggagcggatgagctcccagcaggcggacatgctcaccacggagatcacggccatccggcggaccattacgccggtggtggagcggatctgccggctgtggctgcggatgcacgggtatacttgcggctttgaagtcctgtgggaggacatcaacctccaggacgaggtggaggacgcccgtgcggccctctatctggagcaggcgcggaagctgcggcttgagaacgacgcggcggaggcggccgcgttccatacaaggagagaggtatgaaagaactcgaaaaaaatctggaggcaacgggaggcgtgccggcggaggcagagctggcggcgatcaaccgctttgccaagtcacccctgcgggcagaggaggtgtacaccttttccctgcgactgtgcgacaacgaggtggaccgggactgggagcggttcgatacggcggcgctcaacacactgggcgacctgttcgtggggaagagcggcatctttgaccaccagtggacggcggaggggcagaccgcccgcatctaccggacggagatggtgcgggagggcgcccaggtgaccgcggtaggggacggctactgctggctgaaggcctgggcttatctgctgcggacggagaaaaacgcggatctgatcgcggagatcgagggaggcatcaagcgggaggtcagcgtagggtgcagcgtggcccggcgggtgtgctccatctgcggcgcagagggcggcacctgccagcacacgccagggcagcggtacggggagcagctgtgctacctggagctgcgggatcccaccgacgcatacgagtggtccttcgtggcggtgccagcccagcggaaggcgggggtcctgaagcggtacggccacgagaaccaggggatggcacagctgagggcccaggcggagctggggcggaaatacctgcgggagctgcggcgggaggtgacgcggcttgccatgctggcggacgacagcatggacggcggcgccctggccaaggcggcggagcatctggaggagccggagctgctggagctgaagcgggtctacggggcccaggcagcccgccggttcccgcctgtgccgcagctgcggagccggggagcggcaaaaacagaggacgagacagaatttctgatctaagggaggatgaagcatgaagctttcttatgaggggatcggccagtgggccgccaccttcgcctgtgatgatctggcggagggggagctggtgaaggtcagtgccaacggcacggtggccgcctgcgcggcgggcgacgatttctgcggcatggtgctttctgtcggccggggcggcgacgcctgcgccgtggccctgggcggcatggtcaccgccgggtacaccgtaccggcagaaggagcggcaccggccctgggctggagcggcctcagcgccgacggcgagggcggcgtccaggcggacgcggacggcagcacctatctggtggtggatgtggacaccaccgccaagaccgtgacctttgtactgtgaggaggagagagacgatggcatatcattttgagaacatcaagctggaaaagggaatgtacggccgcagcagccgaagcttttcccaggccctggaggagctggaccccagcgaacactaccggggtacgcctctggaggggctggacgcctttcagcggcagctgaagcgctttgacatccatgtaaagggcgcgggcagcgacatggtagagaagttcttccacacctccgactccgccgtgctgttcccggagttcgtctcccgggtggtgcggcaggggatggaggaagagagcatcctgccggccatcaccgccacggtgaccaagttcgacggcatggactaccggtccatcgcctccgtgcccagcgaggaggacaaaaagctccgccgggtggaggagggcgcccggatcccggagaccaccgtccgcacccaggagaacctggtgcacctctacaagcgggggcggatgctggtagcctcctatgaggctatccggttccagcggctggacctgttttctgtgactctgcggcagatcggcgcctacatcggccggatgcacctggaggacgccatcgaggtgctgcgcaacggtgacggaaatcagaatgccgcacagcagtacaccatcggcacgaagcctatcaccggaaccaaggggacgctgacctatgacgccctgctggagttctggagccagttcgacccctacaccatgaacaccatgctggtgggcagcgacgtgatgctggccatgctgaagctggatgagttccagaatcccctgacggggctgaacttccagggcaccggcacgttgaccacgcccctgggggcaaaactgctgcggacctctgccatgccggcggggatcctgatcggcctggacaggaactacgccctggagcagatctgcggcagcgagatcacggtggagtatgacaagctcattgaccgccagctggagcgggcggccatcacctccatctccggatttgccaagctgttcacggaggcatccaaggtcctggtggtatgagcggggcacaggagacggtcctgaccctggcccgggaactctccggggccggggaggcggaagaggctctgctggaactgctttgtcaggcggcggagcagcagtgggagaagcggctgcggccgggaatgacggcggaggactgcggcaaggcgttcccctgcgccgtggccttcaccgccgccgcggacctggcggcggcgcggggcggtgaaggcgtgtccggcttcacagcgggcagcgtgtccgtgcggatccgcggcgcggcggagagctgcgctttggcggagagcctgcggcgcacggcggaacggctgatggcaccctttgcggtgccggacgatttttgctttcggggagtgagaggatgacagactgggtgcggcaggtcctggagcgatatggacaggatgtcaccgtggacacggcggacggagagcggaccgtgcgggcgtttttacagccgatgacggagcgggatgaacgggcccgaagtgacgttacctccatcggctgggtggatgggcggctgtggctgtatctggggcagacggccctggaggagggggaagccctggcctgggaggccacgcgcttccgggtgcgcagctgcaggccctactacattggtaacgcgctgtcccactactgggcggcgctggaacaggagcgggaggcggcggaatgcgggagctgagtcagatccgggatgcagtggtctccgccctggcggcggagggggtggcggcgctggacgcctacccggaccagcgggccaggcggtatggctgcccggtggcagcggtggctgtggagaccgcagagagccggaccgtgggattctgcaattatctgggcgaggtcttcgataccggggccggcgcaccgcgggagctgtatggaaagcagctggaggcggtgatctccatagagatccggggacagcgggctgcggactgtgaacagggctgtgagacggcggcggaggtgctgctgggaaggctgcccgccggcatccgccccggtgagctgaactgggaagccctgacttgggagcgggagacagggctgttcctgcggcggggaaggctccggtgccgggcgtatttcctggcccgggcggaagagggcgacacggtatttttggactttcgattgaagggagcagtgaccacttgagcgagacaatgcatgagcggccgggggtgtactccagctatgacgcgtcaacggtggtatccgccgggcgggccgccaaggtcattggcgtggcggccaaggcggtgaagggcaccgccggagaggtggtgaccctgacgggctatgccgcgggcgtggcggccttcggcgaggacgcagcggatacgccggggatgagcaccatcctgcggctgctgtttgccaatggtgcctccactgtggcggcggtccgggtggcggaggccggcgcggtgaaggactaccaggacgccttcgcggccctgggcggggaggaggcccggattctggtgtgcgacagcgccgaggagacggtgcagcaggcgctgcggactgcggtggaggatgcctctgccgcccggatggagcggatcgccgtggtgggcggcgacggtgagtcggcagcggagctggtgacccacgcggcggcgctaaacagcgagcgaatggtgctggtggggcccgatgccctggacagcggcgggaagacgctgcccggcgtgttcgccgcagcggccctggcaggggtcatcgcctccggacgggacccgggagtgccgctcaacggggcggagatccgggggctggggggcctgggcaccgcatacaccgacaatgacatcgacctgctggtgcggggcggcgtgacgcccctggagagcacggcgggcacagtatccccggtgcgggggatcaccacccggaccacaaccggcggtgcagcggacaccacttggcgggagctgaccaccatcctgatcgtggacgatgtgatcccggcagtacggcaggccctgcgcagcaagttcgcccgggccaaaaacacggcccaaagccgcagcgccatccgctctcaggtgattgtggagctggagaagaaggtggccgaggagatcatcgacagctatggcgaggtgacggtgacggcctcggaggatgaccccaccgtgtgtctggtggagttcagcttcgcggtggcccatgggctgaaccagatctatctgacggtccacatcacggtgtaaggaggagacggtatggaagcaacgggatttcccaccagcgcggacatctatctggagctggatgggagaaagatcgcggtggtgcagggctacaccgcccgggccagcaaatccagccagagcgtagaggcgttcggcgagagcgagccggtggccaccatcgagggtcagcggaagtacaccctggagctgacacggctgtacgccactgaggacgcggtgacggacggcatcaatttctatgacctgcgggatttctccctggtgatctgcaagccggaccggaaggtcatttacagcagctgccagtggagcgccattcaggaagagggccagctgaatgccatggtggcagagaaggtgaccgtggtggcctccaagcggatcgagaccacggcatgatggaggaactggacgagctgcggccgcccacggcctggcggctgctggagatctggcgggggacccgggagctggcagaggagcccctggaacgcgccctgctgtgcaacgcccaggtgctggcagagagctgcctgcgccaggggaagccggtgttccccgacggcgcggcggtcctggtcgggctgaccgccggggagatggaaacactgctgcgccgtctggcgggggaggaaccctcccccgctccggcggcggtgaaccgggactttgatcaggggcggttccaggcgttgaaggagggctgagatggaatacatccgggagatgctgctgcggcagcggaccgccctggggcggctgatgctgggcggcggaagcgcggaagagccggagaccgcagccgcctctccagccacggagagaacgtctccggcagcgcctgccccatgggagacggacgggacggcgtctgggaccggcggatgggagattcgtgggaacagcttcgcgggcgctggggccgacaggcagactggccccacttcggcgggggagacgctgcggctggtcctggcccggaagcgtgcagaatggcagtatacggccgccttcggaccggctggcaccggagagaccgccgattctgccgggaggcggaatcccatgacggaggatggcggtctgtctgatggaggcggggcaacaatgcccggcggaggcgaagcggaggagacgttctattttctgccgggacgccgggactccggcgcggcaggaatgatggagagcgccagggcgctgtcccgcacggtgcagcgggacgcccgccggtatgacggcggattcccgctgtatgactgaggaggtgagaatttgctgctgaaacccatgcgctataaggactacacctggcctcacaacccggagagctgcgcggtggagtaccggcggcagatagcagcccacaagatccccctggggggctggtacctgcaggatctggggcggacataccgcattttccggggagagggtacctttgcaggggagcgggcctacgaggagttccagacgctggcggaggtctttgaccagaccgggccggggctgctggtgcacccggtttggcggacggtcagcgcctatttcgtgaccctggagctgatggaggagccgctgccggactatgtgcgctaccgcttttccttctgggaggacagcacggcctccggcgggctggtggaagtgcccgtagaaggggagccagagggcggaacggacccggagattcccgccggaggctggggtgccgtccatacagtgcggaaaggagaaaccctgtgggggatcgcctggcggtacggcgtggcgctgaccgccctgatcgcagccaatccccagatcaagaaccccaacttgatctacccgggggatcaggtgaggataccatgagaggacggatcatcaccagcgaccaccggatttttgagctgccggtgctgctgcgctggaatatcacctacaccggcggcgtgccctgcgacagctatgaggtcacctgcgtgtacgacaggaccatggcggagctgctgcatctggcggcgggtttcctggcgctggacgagaacggcggggtgctgctgcggggcatcgtggacgagtacgaggtgaagctgacggcggcgggactggcggtgaccatctgcggccggggatacgccgcccggctgctggacaatgagtcccggccggtgacgtaccagggagccacgctggccgagatcgtccggtgccatgcggcgccctacggcatttccagcgcggagatcgcgccggtgtcggcggactctgtttacaccgtggccgccggcaccagtcagtggaaggcgttggagggtttctgccggacctatgggggcttttcgccccgcttccggcgggacgggctgctggtggcggcgccggagcgggacgacgggcggcggatcgtcatcgacgggaccagcccgatcctctcctgcaccctgcgggaggaccactacggtgtgctgacggaggtgctggtcatcgacaagacccggaacgtgtcctacagcgtgcagaaccgggacatgctggaccggggcggccagtgccgccgggtggtctacaccccggggcagagcacctgggctgccatgcggtataccggggagtatcagatccggcggtcccgggaggaggaactgaccattgagctggggctagccgggtgtttcccggcgtttcccggggacacggtccggctggaactggaggccatgggcctctccggcgagtaccgggtggccgaggcggaaaacacggcctccccggagacgggagaggtctgtacattgatactgagggagcggatatgagatgtggctatcgagacagatgaaagcgccggcgcccacggcggacgcggatctgggcatgaccaccatcaccggagacagcgtgggcgtggtcacccgggggaggtacgggcgcttccagtgtatggccccggcggctatgtgtggatgccggagagcggcgctgcggtactggttatcaaaggtggccctggcggggaggagcagtgcgtggcaggacagcagcaggctttgatcccggaaggcatgggaccgggggaggtctatctcttcacccccggcggaaacagcgtgtacctgcgcagcggcggcgagatcgagctgcagggcaaagtgcgcatccagggcagcctgacggtgaacggggagccctatgcgccctgcgagagctgaggggggatggagatgggactttccctgcggaatggagattatgtgcctgacgggaccggtggcctgcggcggaccgagggccgggaggccctgttggagcaggttctcttccgcctgacagcgcggcgggggaccttcccattcctgccggagctggggagccggctgtggcagctgggacagctgcccgccgccagacggcagagcgcggcggaacaatatgtggcggaggccctggcggcggaaccggggctgacggtggagcaggtgattttgacggaatccggcggcggccgggcacaggtgacggtcggcctcacctggcagggagaggctctgtccgtcaccgtggaggtatcgtgagaggagcggttgtttgaaaacgacagaggagatctaccagacgctgctggcggccttcgcccagcgggcgggcttcacaccggaggcagactgcgatctggccgtgcggctgtacgctgcggcagcggagctgcaggccctgggcatccagagcgagtgggtgctggaccagagctttccccagacggcccggggcgtgtatctggactaccacgcccagatgcgtggcatcgcccggacggcggccacgaaggcggtgggaacgctccgcttttctgtggagcgggcgccgtccacggctctgagcatcgccgccggaacggcctgcatgacggagggagagacccggttccaaaccacggcggaggcggtgctggcagcaggggagctgtccgtggatgctccggcggaggccttggagcctgggcggagcggcaatgccgccgcggggaccatcgtgatcctcaccgcctgcccggtggggatcaccggatgcaccaatccggcgccctttaccggcggcagtgaccaggaggacgacgcgagcctgcggagccggattttggagagctatcagcggctgcccaacggggccaacgcggcctggtacgagcagaccgccatgggccatgagggcgtggcggcagcccgggcagtgggccgggcccgggggatcggcacagtggatgtatacatcgccacggcggccggactgccgaatgggacactgctggcggcggtccaggcggacctgcaggagcggcgggagatcgccgtggacgtgcaggtcaaggccccggcggcggtggagatggacgtgtccgcggagctggccgtccgggagggggcggacttctccgcggtgaaggccgccgcagagcaggctctggcgagctttttcagcggccgcaggttgggcgggccggtactgctggcggagctgggggacctgttgtaccacgtggagggcgtggagaactaccgcctgctggcccctgccgccgatctggcggcggaggacggaacgttgcccatgctgggccgggtgacggtgacggaaatggaggcggacgacgatgtatgaggcgcacctgcgcagcctgctctcaccgctgggaatctatgacttggaagagcactccgccagcggcgcggccgtctgcgcactgggaacagggctggacacagtcagccgccggctggaggagatcgagcgggaggcgctgactgccacggcggagggagaggggctggcccggcgggaggccctgtttgcccgccgccccgccgccgtcacggcagaggaccggagggccgccatcgcggcccttctgcagattgacggggacagcctgacgcccgcggccatcgaccggacgatccggggctgcggaatccgcgcccgggcgctggagatgggcgggggacagctgcgggtgattttcccggaggtggccggggagccggaggacttcgaccagatccgaaagatcattctggacatcctgccctgtcacctggaagtggagttttacttccgctatctcacctgggcggagtgcgaggccgccgggtacacctggggccaggtggaggcggcggaatacacctgggagagtttccagctggcggtaccgccggagcgatagcgcaacgaaaaaaggccgctgcccttacgggcggcggcctttctctgcgccggaagagactgggcgggctgctgtctgaaaaccacatcaaagcagaaaaagacaaatggttttgtggcgcggacaatatttttttacacttcgcagattgcaaattctgggatttccctgtatactgcatctatcgagacgcataccgcgtttggagacaagcataccccgtcacatgaaaaggaggaaacacgttatggcgaatttgacactgtgggagcagatcaaagagttgaagtcccccaagtacaagtgggtggacctgacccatgagttgagtcctgagacgccccattggttcggcttcaagcccctgcaggcggacctgctgttcgactatgcggagggcacgcctgaggacatgatggcccctatgcgctgtatccagtacagcgtggccagccagtacggcacccacaccgacgtgccccggcacttctggggcagcggccgggacatgagcgcgatcaccgtccaggagctgatgtatcccctggtggtcatcgacaagtccgccgagtgcgccgccaaccccgacttcatgctgacggtggacgacctgaaggcctgggaggcccagtacggcaggatccccgagggagcgttcgtggccttccggtccgactggtacaaaaagcccaacctggacaatcccgatgagaacggcgtgccccattatcccggctgggacaaggcggccatccagtggctggtggaggagcggaacatcggagccatcggccacgagccggcggacaccgatcccggcttcgtcaccaccaaggagggcgcctatccctatcccggtgagcagtacatcctccaggtggaccggatccagattgaggtcatgcggaatctggaccaggtcccgcccgtgggcagcctgattgtcatcggctttcccaagttgaaggacggcaccggattccccactagatgcttcgccatctgcccggtggactgatccggacccaacaggcgcggcagagctgcactctgccgcgcctgcgcttctttacactcaaacgtttttatgctatcatgaaaccagcttatttttacaggaggatcgcactatggcactggaatttgatgaacagctctcccggctggaaaagcccaaccgcaatgagatgaccaacaaggaatatgccgtctttaacgagaacgtggagaccatggagaagaactggggctttatcaacaacctgttcaaggtcctgcctctgaacgcatcccagtacatcggcttcctggacttcaagggatccctgttcaacccggacacctgctacctcaccaacgcggacaaagagatgatcggcgtggtagtctcctccatcaactgctgctcctactgcctgaccacccacggcgatgcgctgcggggctataccaagaatcccatgttggtggataagctctgctacaacttccgctccgccaaggatctgctgacggagaagcagtatgccctgtgcgagtatgcctggtatgtcaccaagcacgccgacgagatcgacgagacccagatcgagaacctgcgcaaggcgggcttcaacgaccacgagatcctggaggccgcctttgtggccggcttcttcaactacaccaaccgctgggtttctaccatcgccccagtggccaatcccggtcacttcagccacaaccgcaatttcgagggctgacccatggcgtacaaaaagctctttgaacctggccgcatcggcggcctcaccatccggaatcgggccgtcatgtcccccatgggcacagacctggcggacattcggggcaacgccacaccccgtctgatcgcctattacactgagcgggccaagggtggcatcggcctcatcatcaacgagtacaccggagtggacgacgtggactccatccccacccagcacaacctgcggatggcccaggactacaacgtccaggaggcggaggagctgacccgctccgtccacgcctacggcgccaagattttcgcccagctccaccacggcggcgccacctccaaaagcgccttcaccggtcggcagaacctgagccccagcggtgtccccatggcgcccggggcgaggtgccccgggagatgaccctggaggacatcaagcgggtgcaggagaagttcatcgccgccgccatccgctgcaagaaggcgggctatgacggtgtggagctccacggcgcccactcctatctgatcgcccagttcttcagcaagtactacaaccgccgcaccgacgcgtacggcggctccctggagaaccgctgccgcttcatcgacgagatcatcgccggcatccgagccaagctggggcggtatcccatctcggtccgcatctgcggcgacgagatgaccgacgagcccggcttcctcacgctggaggacggcctggagatcggccgccacctggaggcccagggcatcgactgcatcaacatttccaatggcagctcctggaacggcaacgccaactgcgagcccttctcctacacccccggctggaagaagcacgtggccaaggccttcaaggaggcgctgtccattcccgtcatcgccaccaacaccatcaaggacccggatttcgccgaatctttgctggaggagggcgtcagcgacttcgtggccctgggccgcagccagttcgcggacccggagttcatgaacaaggccagggccggcaagccggagagcatccgtaagtgcatcggctgcatgtactgccgggagcggctgctgggcaacgccatgccggtggagtgctccctgaacccccggctgggccgggagtaccgctaccgctggcaggacctccagaagaacggcaacagccgccccgtggtagtcgtgggcggcggccccggcggcttggagtgcgccgtcatcctggccaagcggggcttcgccgtgacgctgctggagaaggaggccgccctgggcggcacgttgaacatcgccaagctgccgccccacaaggccaacctccaggacgtcaccgacgtgctggcgctggaggccagggagctgggcgtcaccgtgaagctgaacaccgaggccacgccggagaccgtggcggccctgcaccccgtgggggtgtttctggctgccggtgcgccgccggtggtgccgaagtccatccccggcatcgacaaggccgtgctggcggaggacgtcatcctgggtaaggccccttgcaccggcaaggtggtgctggtgggcaccggcctgacgggcctggagtgcgcggagatgatcctggagcagggccacagcctcgccatggtggagatgaaccccaccgtgggccaggggattttcggcgtggtgttcaacgacatttacagccgtatcaagccctatgatccggaggtctacaccagccacaggctcactgccgtcactgataccggcgtgaccgtggaggacatggctaccggtgagaccaagaccatcgccgcggacaccgtggtgctggccatgggcacccacagccaggaggccatggaggcgtcttaccgggccgccggactgaacgccattctggtgggcagcgccgagatgccgggccgcattgccggtgctacccgggatggctttgaaaaggcatggggcttcgaggcagagtgatttggcaggctccccggaaaggggccggaacgggcacagcgattcccgcatgatccggcgcaccgggaataccggcaaatgccgctgtacatgaagctttttgggcattatttctaatcgcacacggtaaaagagaccggacagatttctgtccggtctctttttggcagggtcaggcaaacggttcagcacccgttcaggggattcacatccccctccggcggcacgatgcacagggccatcagctgccccttgccggtattgccgaagttgtggcgcacgccgccgggcacatggacccaggtgccgaactccaggggcacccgttccttgtcgatgaggaaatagccctccccctggatgcagaggaaccagtgtggccaggggtgggagtggacactgctctcggcctccggctccagagtgaagaggcgcatcacatagtcgttccagaaccggccgtcaggcccgaagacgatcttcttggtggaattttcaatgaagtgtccgccggtcaccaccggcagatcccggatgttgccggaatactcgctcatagacagatcctccccttattttgataacctcagtatagaatctttgggtggaaaaatcaagtgttctccagagaggcggcatagcggagcacgttctccagtacaaagtcgggaaagcggcagtccctgccgcacacccgcgtgcgctcccggggcagccggggcagcagctccgcgtccgggatcagggccaggtccgcctgacggagcatgggcacgtcgatgacgctgtccccggcggcgatcacccgctccgggccgaaccgctccaccgcccggcggagagcggtccccttgtcgatccccggtggaaagaaatagaccttccggccggagaccaccgcctggagggcggagccgccgcaccaatcccgggccacgcgttccgccgccgggatgtccggataagcggcgtagacgtacacaccctccacgcaccgcacggaggtggccccgccctgccgggtcagatgatccaggaccgcggccagcgcctcccggtggtcccggaccagcgcctgggacgcggcgtaccacgcccggtccacctgaccgtcccgcagcaggacggcgccgttggcggtcagggcaatcctgggcgccgtgccgtccggccactggatgcgctggtactgctcgatggaccgggtggtgatgggcagcagatggacccgctggacgacctggggcagcaggtctggcgtctcccgggtgaagaagccctgctcggccccgttcagacgctccacacaccggtcctcgggctgccggtgccggtgggagaagaggagcgtgttgtccaggtcgctggcaaacagaatcgttcccatggctatgtgtccgccaggtcccggatcaggccgcaggcccggtagttctccaggggatactccaccagctccgcgcccttctccctggccagttggtagatgtgccccagatgggcttcgtctcggaggctgtggaccagcaccttccagggcacccgccgcagcaggacacgggtggcctccccgatgctgggcttgatgagattgatgtcccggatgccgaagtccgccccgatccggtgcacctcctccagtccggcccggccgctgcgccggggcgggggaacggcgtcggcacaggcggggaaatgggcctggatggtgtcgatgaactggtacgtcaggtcctggtccttcagctcccggtagaaggcagcgccgtgaaagtccccggggctgatgatgtcgccgcggaggaacgtccggctcaacaggccggacacggtggagttcaggcaggagctggcgatgaggaaatcgtcatgggtgccgcagatggccgctacgttggccgggtccgacaaaactgtcagccccggcgagacgccggggtagtccgtcatggctgcgtccagctgccgctggatggcgcccttgccggtccagccgtccacgaactggatatctccaggggcgtggcggttcaggagataggccatggcattgcggtcgatgccccggccccgaatgatggagatggtgtaatgggggaggtcggcaccgtaccggccttggagatagcggcggatcagaatgccgatgggcgtccctgcccgggccagggagaccagggcgcactgccttcccctgctctcccagatctgctccgccgcccgggccacagcctccgctgtgatgccggcgtaccgctccagggcgtcgtgataggcggccagataggccggggagggctcatactccaggggcagcatctccgagtagtggacaccgctctggatcctggcctcccgctcccgggtgcccaggggcgtcaccaggccggtgatgtctttcagcaggatggtcacatcctgactttgatatgtgctgaacataagatcctctcaaattctgcagagatagagtcggggacagcccagctgccccagggccgccgccagccgggtgcaggcggtcccgtccaccgccgcgggcgcatccgtcaccaccagagcggcgtcataggcggctaggtcatagagatatgtcttccggtccccaccgtagaagctgggcagcagcaccccgtttcggatggggtaggcagagtcggggcagatgccgatgggactgcgggtagtggcatggcagcgtactgtggcacagagacccgtctgctccgccagcgaccctaccgtcagggcaggatacatgcactcttcggtccccagcaccagcagggcgccctggtccggcagctcctcccggaggcgggacagcagctcttccgcggcggcgcggcagcagtccgtatagcagccgacggccacaccacggcgtgggtccggcagaggctccgccgtgtacagcgtccgcaggtccggcagggggccctgggcagggggagccgcctcctttacagggatcccggtcaccatccgctcatagtcttgatgttccagccgcaccaggcactcacaggcaatgccggcctctgccagcctggcctggttctccggagagacccggctgaggatggacgcagctgccagccgccgctcgcccagccggggataccgctcccgcagctgctggaccatgttgatgagggtccgcccggtggagaactcgtcatccacgaatacgatggcggggctgcggtcgatccagtccgccagctggtcggcacagagccggtgctccgctgcgtggctgtgctcctcccgaaagaggatccaatctccgtccaacgcctcccgggtggtgtggacatagaggcagtccggccccagccgggctgccacggcggcgccgatggcggtggccgtctcggcaaagccgatgaccagccgggcctccgggtacttggcggccacctggtcccccagggcacccatcatctccagagccgccgcggggctcacagggatgtgcttggcctgcaggggattgaccagcaggtagctccgcttggggttgttgtatcgcttggcgatccgcagcgtgtctgcggccgtatatgggtgcattgcggcaccctcccttcgtcgtgtcatgaaatcgtggtgagactttgattatagcacagcttccaccccaaagaaacctctttcccgcgcctcggccatttcaaattgcgccgccggagaatctgtggtaagatgggaaaaacaacaccgccgcggccggcggggaggagcgcgccatgaaaaagctgcaatacaattctccggtgatcctgacctttttcctgctgtccctgggtgtcctgctgctggactggatcaccggaggatggacgaccctgcacgccttctgtgtctaccgctcctccctggcagatccgctgttctatgtgcggctgttcggccatgtgctgggccacgcggatttcgaccatttcctgggcaatatgctgctgcttttggtgatcggcccgccgctggaggagaagtacggtagccggacgctgctggccggcattctactgacggcgggggtctccggcatcctgcaatgcgtgttcttccccggctccgccctgctgggggccagcggcattgtgttcatgctgattatgctggcctccctggcgggcatgaaggacggccgcatccccctgacgctgatcctggcagcggtcctgtatctggggcaggaggtgtacgccatggtggccctgcgggacaacgtggccaacttcatgcatctggtgggcggcgtcaccggcacggtattcggcgtggtgctggcaaaaaggcggtgaagaaaaaagaggcgggcattttggatgcctgcctcttttttcggtttacttccgtcccacgatcaccttgcggaggatgtccacggggatcatggtgaacgccagcagaatggcggcagcccacccggcgggcgggaagggcacacagctgaacatattgctgatccagccgaataccggcacggggatcagggcagcgttgacgatgaacgcctgcaccaggacgatgataacgaacacccgcatgaaaccggggttcagcttcagatccttaaagatgtcaaagctgtcgctgcgcacgttgaaggcgttgaacagggcgctccagatgaacagcacgaaataggcggagagcttctgctccgtgctggcaaagaagctgtcaaagaaaggcactttcaggaagacaaagctcaacgccgtcagccacaggcccatggtgacgatctgggccatcatggacttgctgacaatgctctcatcccggcggcggggcggctcggacatataccgctcctgggcgggctcattgcccagcatgatggcgcccaagccgtccatcaccaggttcacgaacagcaggtgggtgactttcaggggctcctccacgccgaagaagggagcgatagcgctgaccaccacggcggccacattgatgaccagctggaacctgcagaatttcaggatattgtggtaaatggtccggccgtaccagatggcgtccttgatggacttgaagttgtcgtccaggatgacgatcttgccggcctccttggcggcctcggtgccgctgcccatggcgaagcccacgtccgcccgcttcagggccggggagtcgttgacgccgtcgccggtcatgcccaccaccaggttcagctcctggcacaggcgcaccatccgggacttgtccgtgggcagggcgcgggcgatgacccggatgcgggggatgatcttcttcacctcgtcgtcggacagctcgttgagctgggtggaggtcagcgccacatcgtcccgggtccgcagcagcccggcctcccgggcgatggccacggcggtctccagccggtcgccggtaatcatgaccacctggatgccggccttctgcacctcggcgatggcctcccgggcctcgggacgcacgtcgtcccggatgcccaccaggccgatcagcaccgtgtcggcgttgatggcgttctccgtcatctcgctgggggagtagccgaaggccagcacccgcatggacttgcctgccagctcgtcgatcttggcgttcagggactccaggtccaggggatgctcgtccccgtccaggctgaggtacttctgggccacggccaggaacttctccggcgcgcccttgtagaaggtgcggcccgccccggcgatgtaggcctggctgaacttattggcggagttgaagctttgggatttggtgacggcataggaggagacctcatccagcttgtggaaggtctcctgccccagaaagcgcatcagcgcctggtccgtggcgttgccgcccaccacgcggccgctgccgtcatacatggactggctgttcttgccgatggccagatcgatcaggcccttgagcttggtttgctgggccagttgatccagagggatagccacgccgtctgcggtgaagaactccaccacctccaggtggcccttggtaatggtgcccgtcttgtcactgaacaggatgttcagggagccggcggtctcgataccctccgccttgcggaccagcacgttgtggtccagcatcttgctggtgttctgcatcagcaccagagagatcatcaggggcagcccctccggcacggcgcacacgatgatgaccaccgccagggacacagcctccacgatgtcctggatgatgactggggctccggaggagaagtacgccgcaaacccgccggcggagaggatgaagtagccaaagtacatgatggcgataaccacggcgccgatgtagccgaagcgggagatcatgtccgccagcttcccgagcttcaccttcaggggagagtccggctcgtcgtcctgcatctcctcggccatcttgcccatcatggtggcaaggcccaccttgcgcacatccagcacgccctcgccgtcaaacagcacggcgccccggaacagggagtgggcgtccacgaaggtgtcgccggtgatgtcctccggcagggggaaggactcgtccgccgcggtcttggggcattcctccgcctcgccgttgagggcggagttgtccacccttaaagttccgtggatcagcacgccgtccgccggcaccttgtcgccggactggagcaggaccttgtcccccaccaccacgtcatccacgtcgatgacggtgaccagaccgttgcggtagaccttgcactgatcttttttggtgctgtccttcagctggcggtacttcgtgtcgctggccacgccggtcttggcggagacgaatgccacgatcagcacggccacgacagtgccgatgggctcatagatctccgcatagcccagcacacacatgacgatcatcagggccgcaatagccagcaggatccggatcatggggtccttgaacgtctccttgaactccgcccagaaggtggtgggttcggagtcggggatcacattggacccgtatttttttcgggattcctcaacttgtttgtcagtcagtccattaaaatgcatgattgttacacccattcgctgcgggaaggggggcctgcgcacagcagacccctcccgcggttcaaattttcaatatctttttttggggccgccgctcacatatagcgccgggccagctccaccaggccgggatccgtggtggcctggccgatggcgttgaacttccactcgccgttgttgcgatagacctcgccgaagatcatggcggtcatgttgtcgtagttctcggagaggttgtagcggcacatctcctggttgttccgggcgtccacgatgcggatgaacgcgttctggatcatgccgaagtgctggcggcgctgcactgcctgatagatgttcaccaccaggacaatgcggtcatactccgcggggacgcgggccagatccaccacgatctgctcatcgtcgccttcgccggcgccggtcaggttatcgcccatgtgctggacagtgccggtgtagtgcttcagattgccgaagtagacgatgtccttcttgtccgtcagcttgccgttctgcagcacaaaggcagaggcatcgcaatcgatggcggggccagaggacccgaacaggctgccgaacaaaccgcccttggacttggcggcctcatcccagcccagaccgatgatgactttggaaagaccctcgttgcccttggtcaggctgatcttctggcccttttgcagactcacagacatatatatttcctccttcaaaatgtccggccgcgcccccgggcgcggccggagagatctgatgctccctgtcgggatgcttattccacgtccacgccgtagttggcgcacagggccgccagaccgccctgatagccgctgccgatggcgttgaacttccactcgccgttgttcttatagacctcaccgaacaccgctgccgtctcgatggagaagtcctcgcccaggtcatagcggagcatctcctggccgttggtctcatcgaagatgcggatgaaggcgttgttcaccataccgaagttctgccggcggctctccgcctcgtagatggtcacggtgaaggcaatgcgctggatgttgtcgggcaccttcgtcaggtcgatgcggatctgttcatcgtccccggcaccctccccggtcaggttatcgcccagatgctctaccgcgccggaactgtgcttgagattgccgtagaacacgaagtccccggaggaggtcactttgccgctctctcccagcaggaaggccgccgcgtccaaatcaaaatccccgccggtgtcaaagctgttcacgtcccagcccaggcccacgaccaccttggtcaggccgggattccccttggtcaggctgactttctgtcctttttgtaaactgataggcatgatattcctccttgtaatcactcagcgtcaatgccgtagtggccgcacagggctgccagaccgccctggaagccgctgccgatggcattgaatttccactcgccgttgtggcggtacagctcacccaccacgatggccgtctcgatggagaagtcctccgccaggtcgtagcggatcagttccgtgccggtggactggtccacgatgcggatgaaggcattggacacctggccgaagttctggcggcggttctccgcgtcatagatggtgcaggtgaaggcgatccgctcgatgctggcgggcaccttggccagatccaccatgatctgctcgtcatcgccgtcgccttcgccggtcaggttgtcgcccatgtgctccaccgcgccggtgctgtgcttgaggttgccatagaagatgaagtcccgctccgtggggcactttccgctggcgcccagcaggaaggcagccgcgtccaggtcaaaggcgctgccgctgtcaaaggcgttcacgtcccagcccaggcccaccatgatcttggtgaggccggggttgcccttggtcaggtcgactttttgtcccttggaaagattgatcggcatagtgatttcctccgttcccaatatttaatgattcacggaccccttgtccggcatgtgatacatctggtcgaactgggccttgatggcctccagtcgcttttggtcctccacccgctgcttgcgggcgttctcctggatctgcttcgtctcgtcgatgccgctgacgatggtgcgccaggtctgctccagcgtctcgattttaatggagctgccggaggccagacgggcggtcatcttggcctgctccgccgtgttctgggcgttgcggatcagcatttcattggtcttggcgtccagggcgctcatggcctccgcctgcagccgctggcgcttgagcatgatggcctgggtcagcgcctgcttgaacaccggcagggtgatgatgaaggcggagttgatcttccgcaccagattcatattgctgaactgcatggtcttgatcatggggatggactgcatggccacgttctccgccgtccgcaggtcctgagtccgctgctccagcatcatcagggcctgattcagggtggtcagctcgaactggatggagttgtcccctgtggcctccatatccgcctggcgctgggcgatgtatgcctccagctcccggcacccctgctcaccggccaggatgtaacgcaccagctcgtggtagtagttcacattggcctggaacatctcctccagcttccggttggactgcttgatgtctgcctcgtactgcttcagctggacatagatcttgtccacttcatcgcccatggtgtggtacttggcgaggattttgtccagctgcttgcggaggtttccgaacagcttgccgaagaggccggggttctccttgatctcttcgatgtcgaacttgtccatgatcttggccagcgtgttcagcatcgcgctggagtcatccagctgggacaggttcatgctgttgagtaccacgtcggagcacttggagatctcgtctgctgctccggcgccgaaggagacaatggactccaggttgtatacctcgatctggctggccagggcatccacctccggcgagttgaccagcgtctgggtcatcatctgccggtcggcggagatgtcgtactgctgatagctctcttcttcctggggggcggcaggtgcctgtccctgagagggctgaggctgggatggggtcggtctgctgagattcaggcccataagtcatatactccttccaaatagttttctgatggagtgcagtccgctttcctgcacggtgttgaaatcaggaatccgcaggtcgtaaagatagtccccgatctgcgtctcgctggcaaaggggcgcgtgaagtgctgctcgatgcactggtagccggtggggacgaagaatagcacgtcgaagcccactaggctcaaaaacgcggcgaggatgctgtcctccagagagatcctctcctccgtggggttgatgtagatgagcttggggttcttcttggtgaagtcgaacttctggatcttccgcagcaggtccttggggagattcagggcggtggcgatcaccgtgtactccgtaccgttctcaaaggtgccgcggatcagcttctggtccagcagaagctgcaatttgtccagcaggtgctcctgcatctccgcccgcaggatgccgtagagataggcgctgtgggacttgatcttgccgcgcagcagcttgccgttcttcaaaaactgcgtggcgtacggcttcacggggttgggatccgtgccctggacccaggggacagaccggaccacctccgtgtccggcgtgatgagcttcttgatgtccagccagtactgggaggcgttgccgtccttcacgccgcagatcttctggcagatcaccggcagggtgacggtgtccccggcggcggaaaagctgggacggtatttcatctcctggtcccacagaatcgggatctcctcgtacatggtctgcagcaggaccgtggaggccttggcgtactgctggttccgatacagtcccgtgtcctggtacatcagccggtccaggtcccgctccgcctgataggcggcggtggtgacccgggcctggttctggtccaccgggaagcggtccagagagacggattggggacagtggacctccagcagatccggggtgtggagggcgctgccctcattcagattggggagcagcaacaggacatccaccggcaggcgggccagcagccgcaggaacagggctccggtgtccgacgcgcatctgccaaactggagaaagaccgccacctccggcgccttccagtccggaaagaggtccttctgataccggttcagccagcacaggaggtacactgcccggctggtgagcttggagacgctgccgccgcaccgctccccctcctccagcaccagatcgatgaaagctcgggtcatcaggcgctggagctccacattggccggataccggatgttggcggcgagacccgccgccagctgctctgcggaggcgtagttgccccgcttgaccgcggcgatctcctccggcccggggggcgcggggtctccgttgaccacgcagatccggcggccgccgccctggagggactgataaaacgcgaagaggtcgttggtataggtgagattgtcctccacaccgtactggcagaggaagaggttgcagaaaaagcggggatcgtttccgcgggcctgcacagccgtcagcgccgcgttcagctctgccttctgcacccaggcgttggtgcagggagagagggagggcggcgtgccgtagagccgctggcggcgcacctcccgctccagctccgcctgaagctgcttgacaccgaagcccgccgggaagggccccaggccaggggcctgatacaggtgcgacagggccgactgggggtccacggtgagatatgcctggtcgccgccgcactccagcaggacgatatccgcccccgcccgggagaggaccgtcagcagctgcagctcataatggctcacgtccccggcatagaggatcttgggcagcgtctcgccgcccagcacgttgacgatccgctcgaacttgtagtagagccagcacatgtatttcatgtaggcattgcggagcatattgtcgtttttgcccgcccggcgcatatcgtccagggtggcatacatggccgtcaccacagcgtcccgctgcccgtccgtcatccggggcagccattttttcagccgctgggagagaaaatcccggtccatctggaaaccggaccccatcatctcattgaaataggacaggttgtcgggcgtggggttggggatgcgcccgtcgatgatgacgccggaccggcgggccgcctcatagtagcggcgcagaaaagcggccaccgtctccccgtacccggcgatccggcagaaaaacacgcgggacccgccccgttccgagagcgggcggaaataatcattcagttgtgccgttcccgcctgttgaaacatcgcagcccagtctctttctcatcacaagatttgtgtttctcattatagcggctttggagaggattttcaacagatgcatggagcatagcttgagaatccacaaaaattttacattcgtcagcatggcgcgggtattttcttctccggcgggaagtgctataatagcgcccataagtgcccggccgaagccggccgctgatctgaaggtaaaagaggatgagcatgagaagcaagttgactggatatgacgtgggagcactgctctactgccctgccaacgcccacgggtcgattgtgggcgcgattgtggagcagcggtttccaacgccgtattctctggcgttctgcctggaggacacggtgcgggaggacgccgtggcggacgcggagcggatgctgcgggggacgctgtcccggatcgcgtccgctgcggagggcggctccttttttctgccgcccatttttgtccgggtccggtcaccggagcagctgctgcggctggcggaggagtacgccccgttttcctccattctccgtggattcatcctgcccaagtttttcctggagaactgcggggcctatcttgcagccatccgctccatcggccggacggaggagtacttctatatgccggtgtttgagtctgcggccatgattcccccgcagactcgccgggaggctctgacggaggtgcgggcccagctggacaccgtgtctggctctattttaaacatccgggtgggggggaacgacctctcccacgccttcggcctgcgccgtccggcaaatcggaccatctacgacctgcgcccggtggcggatatcctcatcgacatcgtggcggctttcggcactcaatacgtggtgtccggcccggtatgggagtattactccggcgagggatgggaagaggggctgcgccgggagatggagctggatctgctgaatggcttcaccggcaagaccgtcatccatcccaatcagatccccgtggtgaacgaaatgctccgcgtttcccgtcaggattacgcggacgcccgggctatcctgaactgggataccggcagcggcagtctggtctctgccagtgaggacggcggccggatgaacgagtacaacacccatagccgctgggcccggcggatcctcctgcgtgcggagcggtacggcgtcagggcgtgagaaaaaggacttgaatttcgctccgacctcctgtataataaaccagtatccaccggccagtgtgatggaattggtagacgtgacggactcaaaatccgttggtggcgacaccgtgtgggttcgagtcccaccactggcaccagttgaaaatactcaggtttttcatgaattgaaaacctgagtattttctttttgaagcccggttctctcctggagttctctcctccggcttgaatcgcggctgagatgccaggggtgatgctgactgtctggttcattttcgttgcaggctgtttcttggaatccgtgtccaggtgcgcgtagatattggcggttgtagcgtagctgctgagtcccagccaatcctgaatatccttcaccgcgactccgtttttcagaagcagggatgcgcacgtatatctgaaatcgtggaaacgaatcggacgaaggccgtgctgcttcaggacccgtttgaaatggtcggacacaaaattaggcttatatgggatacccagctcgttgacatagatgtactccgactccgtgtagcagtttccgcagaactctttacaagtggctttccgttcctgcatccgcagcagaagttcccggtactggggaaccggcggcatcgttctgcagctggatttgtttttcatccggttcttgccttcgatcacactcttgccatcggaacgatactggaccacggtatgatcgaccgtgagaatatttccctcaaagtcgattgcgctccaccgcagtcccataaccccacttctacgcaggccgtagaacgcagccatcaggaccggaaattctaccggatctccttacataaaatgtccatcaaaaatgaccaaataaataaaatggttgtcttaatgcatgtgtattcgctccatacggagccggcctgtaaaagtaagtatgcgctcgtgttacatttttgtttctcccaaaagggaaaaccgttcacatcttcaaatggatcatttgatagaaaagtcacacgggtgtggaggaattcgtatgcctaagatattttcagattgagcattttcccttttctgaaaaagagcaggcccataaccaccatgtagccctccttgagcaccataagaccaaacaggacccacatctggggatagcggaaggccagacaaagagccaatgcaccgtgtgtcagtttgtccgcgatcgggtcaagcgccttgcccaaatttgtgatcatgttgaactttcttgcgatcatcccatcaaacagatccgtgagactggagaggaggacaacacctgcggcccaatggtacgcttcttttgccagatagaggtaacagaataccggaatgaggaggagccgaaaatatcccatcaggttcggaatagagaatctctcttttgtgttgaatggcttcattgaggttcttctccatctcctatatgcagacaagtcatgcggaagcagaagactggaaaaattgcgacaacgcgtttacagcttcggcttcgtcagggccgtctgcagcgacctgtacctgctgtccctgacgaaagccgaaggagacgaccccgagaagacttttcgcattgatgcttcgctcaccggcgattatgcggatggtgctctgaaagacattgacatggcttacaaacagtgcggctgtatgtgtggtgaaatcttcctccaactgcaatgaaagggtccgcgttgtcatgggaatcgtcctcccaatgatagattttcatttataaatgctcgatccaggggcttcggaacatgtgcgcttatgatgcgcgatatttgcgctctcctttgcacagccagccctttcttctccaacttcgaaattcccagcgggccagcagcaggcagagcaggaacgcaagagcatcggctatcggtgcggccagaagtgcgccgtctagcccgaaggagcgggatagcagaagcgccagagggatcaggaagcagccctgccgggccagaggaatcagcagggacttaccaggccggccgatcccctggaagaaggaggctgaggtcatgtgaaggccatacaggaaaaaggccagcatatagagccggaagcagtgctgtgcgcaatccagatagagcgcattgtccgatacaaagcagcttgcgatctgccgcgggaacaccatgaaaatgagaaaccacaccactgaaatgcctactgcaataagagaagctatatggaatgtcttttggacccgcgcatagtggttggcgccgaaattatagccgttgatgggctggatggcagaggacaccccgacgaacatggagtgagcgatctggtagaccttcatcatcatgccgtagacggataaggcaatgtcactgccatagactgtggcggctccataggcccgcatcagattgttcagggtaatctgcaccagagcggagagcatctgcgtaagcaagctggggaggcccagtgccagaatacgacaggtcagcttccgtgtagggcgcaggtcctcccgccggatatgaacggttttgaggcggcgcaggtagagcagggccaggcatccagcagccacctgcccgatcaccgtggcgatcccggcgcccacaacgcccatcttcagcggaaagataaagatagggtccaggatcagattgatgaccgcccctgtcatcatgcacttcatcatgtactgcggggagccgtctgcccggataatggcggtgaaggcgggacaaaggagctggaacgggatcccccatgcgatggcgcgcatataggacagagactctgcataggcagtcgacgtcgcgccgaaaaggactacgatctgcggggcgaagatgccgcaggccagagcggccagcagaccgctggccaagatcagggtgagggcgtgactgatggtgctgtccgcctcccgctgctctttccgacccaggcacagactgatattggcggcacatccgtctcccagcatcaatgccacagcattgaccagaatggtcagcgggaacgcgatattagtggctgccattcctgtaatgcccacgccctgtccgacaaagatctgatccacgatgttatagaggtagttgaccatcagtgtcagtgaggtgggaacggcgtatcgaacgatcagtttgggtatgggatccgtttccaatgggtttggctgcaggtttggctccatagcaaggctccttccgtattcatactggacgcttccgagggagaagccgccggaaataaaaaatcccggcgccatttccctgacgcagagagatggctgtaccgggtgcttagagtatacacttttgcttgaggaggatgggcatccggcacggcaccagaaagccttcttctcccctccagaccgaacctgttggctccggaattccaccggattagctgatcgctcgcggactgttaccgccagtagagaaatatctcgtttccgaagaaaacttacatacctaaatgtatcattaaataaaagaaccgtcaaggaaaatgtccttcccgccgtatcaacttctgcgctttctgatcgatatcctgtgtctcgtacaaggcattccattttggcttttcctgtggtaaaatatcaaaatcgacaaaatcacaggaggcaggacagggatgaaaacgggcttggtcttggagggcggcgccatgcgcggaatgtttaccgcaggcgttctggactcctggatggatgaacagatatcctttgatggaatcgtcggtgtgtcggccggtgcgctgtttgggatcaatgctcccgccggtcagaagggacgcgccatacggtataatttgaagtatatccgggataagcggtacatggggctgcgctcgctgctgaccacgggcaatctgatcaacgccgacttcgccttctatgaggtgtcctccaagctggatatatttgatgaagcggcctttcagagatcgggcgttgacttctatgccgcggtcaccgatctgcacacaggcgccccggagtatatccggatcacagagccgttccgtcagatggaggtcctgcgggccacctctgccatgccctatgtctcccggcctgtggagttggatgggagattctacctggatggcggggtcagcgacagtattccagtccatttctgcaagagtctgggctacgacaagaccgttctcgtgctcacacgtcccttggagtatcggaaagagcggcccgcagcatggcttcagcgattcaaccgcctctattaccatcgctatccggcctttgcggagagtctgaaccggcggtgggaagtctataaccggcaggtggaggagatcatagggatggagcagcgcggggagctcttcgtggttcggcccaatggcccactcccaatcaggcgtgtggaaaaggaccccgccaagctgcaggctgtttatgacctcggggcagaggccggcagggcgtctctcagcggactgaaagagtatttgctgacgcatgaatgatggtagatgatataggaaattgcgcatccagcaggcaggggcttgtatggatgcgcagtttttctttgtgcagtatacagcgtcccttggtccaggtatcatgattggcaaaactggcgggatggcatatatactttttgaataaagaatttctgatacatatcggacaaattgacatttttttcaagtaacattataatgttcatatattcactgccacaagaggacgtggttagaaggggtgaagaatatggatcaggatctgcccttatgggtagagggctgcgccgaaacatatataatgtgggtgtgaatggaagcagacagctgctgaagatcttgccggacaaaggtatgcaggtgcggccctctggagcaaacaaagaaaaggagggcatttttgatggatcacagcgtattgacgattttggatctgggaatcattacggcataccttgtcatcatggtcctggtgggggtctattccgtcaggcggatccagaacacaaaggattattatgtagcgggccggtcctttgggccgatggtgctgatggccaccgtctgcgcgacgatcatcggcggcagcggtctgatgggccgggcaggtgtggcctataccgacggcttcaaggcggtccttaccgcaattccataccttctgggaatgttcattttctccggcatcgccgggaagatctcggatatcgggatgcagtacgggatcacctctatcccggagctgtttgaacggcggtttggccgggcagccaagatcaccctctctgtgctgatcgcgttcgccatgatggggacggtggcctcccaggtcaccgccacggccacgatcatccggatgctggggggagagttcggcctctcctatgagatgggcgcgctgatcgcaacagtggtctttatggtctacacagccacctccggcctgttcggcgtggtatacaccgacgtgctgcaattttatatgctgatcgtcttcgtgtatatcctgatcccggtggcggccctgttcaacgtgggcggctttgcgaactttgcggccaacctggacccggcgctggtggagccgcatattgacggcagcattttgggagacatcatcacctatctggttttcaccatggcaggtgcggaaatgtggcagcgcgcatttgccgccaagagccgaagggcggcaaagcgcgggatgttcctgggtacggccgtatacggcgtgaccattgtgctggtctacttcatgggtgttgtgggccgtcagatcctcggcggcgacatcctggcgcagtatggctcgacggacgctgtcgttccggccctggcgatccggatccttcccgccggtctgacgggacttgcgttggccggtatgctctcggtcatcatgtccacggcggacagctatctgctggtatctgtgcagacctgcgtccacgacatcggaaagaccatccgtccccaaatgccggagcggaccgagatctccctctcccgcatcttctccattgtcctgcccctgggcgcgctggtgatcgcgttgtacatccacaatgcatacaacatcctcatgttcgcctggagcttctatgccgcatcggctgggattcccgcatttgcagcgctgttctggaagaaggcaaccaagaccggcgtcatggccgggttgctgggcgggtttgttgtctgcgttggctggaagctggcaggccagcccttcggccttggggcggcggtgccgggcacggttgcctgcggtatcgcactggtcgttgtgagccttgcgacttataagcgcgcaccgtccgtattcctgaaagctgaaaagcagagctgatagggagctgctgcatccccatatcggaaagcaatggagtgaacattataagagccagccggaaattttgaagatccccggctggctttgttttggcgtattactgatagataaaaagtctccgatcagacagcagacctcgccactgctgtctttgccccaataccaatggcacacaccgctttttcagatcgcgtcaccaatgcggcggtcagcgctccgtcctcagagcttccgacagcgtatggcagttcttcatcttctgcatcccaaaatcctgtcctgcacgcatcaactacatggcgggacggtggcctgcgcttgtgcgcctggccatggaccatctttgcaacaacaaaggttactggatttctgctgcggaaccggatgatggcaaaggctgagaagtgatcctgatttgtccggagcacagcttcagcagaccgatatcctgccgtgtgacgcgacatatcccatgcggatttgtcagcagagcgacatctgccttctcgccattccaagccattctcagaaaggaaactaatatcgttcagaaaggcgaattgcaggaagaagtcattgcaaaaatacaacaagcacgccctgcggagcgatggggagaaagaccaaaacaagggaggcacgcttttacaacccgtatccgtcattgcgggccgcccaccgcgcgggacttctatacaccatggtataaaacagttctgcgggcttttacgccgtcacagggcacagccgggcagagatcatttgtgccagtgcggaccgcagcaagaccaatggacctgatcgcctggaaacgcgtgctggatgggcgtacgatgagcgggtattccaactgcattgagtatctgatcgagcgccagagcaccttcgccatgtggaaatttgccgcctgtgtcagtgagcttctggttttccgccgataggatattttgggataagggcgcgcccccagacaagcggccgtcgtcaaggcagacaaggagcatgatgcgttcaacaagacccggaaaatggtctccgactctaacaaggaagtgctcagaatactggagtcaggagatggaaaataacttcattatataattggctttttcgtgatcttatggtatgatacccttacgctgtccagagcataatttctagaatgaatccccctctgtaatgtgagtgaatcaccgcaaagtggtactgttcggcgccgatgggcgctatctttttgtctgggcggatgtagaagcacggatgaagaagaattacaatatgcattgtatgccgatggttgtgctgttgaacctcggagaggatgcgctggttgtccgccgccaaggatatgaaggcgtgccgcaaaatacgggcctgcctgaatggctgacggacggagaaagggggcaaagtgatgcgcacactgattaaacacggactgattgtagacccggccagtcatgttcactccaaaaataatctgctagtggaagacgggcgtattcaggggctgactgctgaagagccggaagctgatgtgattttggatgccgaagggatggtggtttcacctggttttgtggatatccacatgcacgaggatccttatgacccagaggaggggcgactgattcccagcattatgacctccatgcttcgcatgggagtcactacagcgattggtggaaactgcggtatcaatacggtctcgcctctgcggtatttagaattgatggaccgtgatggcggcccgatcaatatgggactactagctggccataccttcctgcgggagcaggccgggcaccgggacaagtacagtgcaattcggcccgatgaacaacaacggttgtcaaggctggtcaaagaggctctggaagcaggttgctttggggtgtccttcggtattcgctatgtacccggtgtgacacgggatgagatggtgaaaaccgcctgcttctgccaaagccatggccgtcttgtggccgcccatgtgcgagatgacgcggataatgtattcggcgcggtggaggagttggtttccatagggcggcagctggatcttccggttcaagtttcccatgtgggaagcatgggggatttgggcagatggaacgactgctggccctcatagatagatatcgcgcctccggtatggaactgagcggagattgctatccgtatgacgctttcagcacgcgaataggggaaacaacctacgatgagggatttttggagcgttactgcacacagtattctgcgatagaaatctgcgagggtatgtacaagggacaacgatgcacggagagattgtttcatgaactgcgtcagacagcaccggacacattgacggtctgccatgttatgaaggcggaggatgtagctttggccctgtctcatccggccattatgctggccagtgatgggctgatggatcgggggcaaggacacccgagaggtgcaggggcgtttccacgcctgctgtgccggtatgttgcagccgggaagatgaacttggatgatgcggtcgccaagatgagtgccatgccggcccaaaaactggggctgacgagaaaggggaccttacgcaagggcgcagatgcagacatcgtaatttttgatatggatcggatccgggactgtgctacgtttgagcatcccgaccgtcctccggaagggatagaatgggtcttgattgggggaaaaatcgctgtggaacacggaacagtcaagcagtcaagtctaggacgagccattcgcgcttagcaatggagcaggagggagagacggcatggacgaatatgtgaagcggcagctttcctcagttccggggcatatcggattttactacaaaaacctagtcacgggagaaacggacggaagccgccaaacggagttgttccaagcggccagcgtaattaaactgccaattttggcggccatcctgctggaggagcgggagcatcccggtgtgctgcaggagcggctcttggtccgggacggcgacaaagtgcccggatgcggcgcattgcagcatatctccggtacgcaggcgtatgacatagaaagcctctgtaagctgatgattactatcagtgacaatacggctacgaatgtgttaatccgccgctttggcattgagttcctgaatgagcgattccgggtgctcggccttcaggaaaccaagatttttcgctttctgtttgacacggaggccgcacgtcagggaaaggagaatttatgtcaaccgaaggagatcggtagccttctggaggaaatctaccacggacgctgcgtgagtgccaatgcgtctgagcgaatgcgggcgatgctatcgcaacagcagattaaccataaaatccccagcctgcttccgcccaccgtgcgggtggagcacaagaccggcgaggatgaggggattacgaatgatgtggggattctatatgggagagaaccctgtgttctggtattggtatccaatgaaactgatgtaccggcctttgagcaggtaatccggacagtgagcctgcactatacacgagtgtgatgacagacatatagaaaaaggagaaaacttgttatggccattattaagacgatctcggaccttctgtggggaatgcctctcatcgtacttattctgttggctggcattatctttacggtcggctccaaattctttcaaatcgcacacttaaagcatattctgaaaaacaccattggaacacttttttcaaaaaaggacaacggtaagggcatgatgaaacccttggaagtaatcagcattgccgttggcggagcagtgggtgttggcaatatcggcggcgtagcgaccgctatcgcggtgggcggaccgggtgcagccttttggatttgggttgcggcctttttgggcatgatgatgaaaatggccgaagtttccctggcggtatactaccgttcaaaggatgaaaagggcggctattatggtgggcctacatactatatggagaaagggttgggacgggataagggcttcaaattctggggcgtgctggcggttatcttcgggatcggcatttttggaaatgtcttttccatgcaaaacttcacggtcgcacagtccgtcaacgccacttttggcattcccatgctggcggtaggtttagtctatgttggtctcacctatttggctactgtccgtgaaattccttggctgggcaagctggcggcgaaagtagttccccccatgtgcgtcttttacctggtaggcggaatcgtgattatcatagtaaatatcacacaattgcccgcagcacttggactgattatcagcgatgcatttaccgggaccgcagccaccggcgctttcatgggagcgggcgtggctttgattatccgaaccggcttatcccgcgccatgttctccagcgaggctggctggggtacatcgcctatgattcacgcctccgccaaaacggagcatccggtgaagcagggattgtggggggcatttgaggtttttgtcggtacgatgtgtatctgcacggttacctccttggttatcgtcgttaccggcctgtgggattccggcctggatggtgctccattgaccttggcggctttcgaaacagtgcttgggcctgttggaactatcatcatcacggtggccattttcctctttgctctttctactactaccggatggtgggcttatttcgaagtgctgttgcgccatttgtgcggcacgaatgaaaagctcaagcggaccttgattaacgtatttaaggtaatctaccccattcccgggttccttgtagtgcttctggctgcggtgggaaacgatatttctggtgcggatatttgggaaatcgccaatttgacaacgggaatacctgcctttgtaaacctgattgtcattgtcatactgagcggaaagttcttccaattgcttaaggactacaaggctcgttatctgggaatcggtaccgttgatccgaacttcagactttttgatgaagaggaataaaccgagcctgaaaatggcggattgagaagccaagaggggggcgtggctctgccacgccctccagcggcggaaaatatcaggacagcgcatccaacaccacatcgaacagatgcatagggttaagctgccctctgtcataacgctggcaagtgaatcaacgaagtccctgtcgcaggaaacggctggaatcaatgtcacatcggtacagactccatccatcacttcggcctgtattccataagacggaagtcagctggactgcaatggtacagatcggccatgcggcacacgatgccaaatggaggggcagaagtccctgcctcatacaacaagtgtacgtgctttgctgcggccgcttgggtgtatccggctttctcccggcttgctcgaacggattttcaggatgaccacctttttcggttctgcacattttgaattcctcctgtcatttttctaatacatttgggccgcgctccccggaaatccttgtgttttcaaggtttccggggatattttcttggccatttcccttgcttttttccttacgagatgtctgtaagggaaagctctcagctttcacccgcacccttatccagaaaccgggcggaagaacctgtggttcctttctttgcatgggcgtagatgttcatggtggtgttcacgctggaaaggcccagcagctctcggacatctttaaagacgctccgccataaattatgttgcttgtgaaggtgtggcgaaggacatgaaagtgaagggcctggatattatcgaatgtgatgttggctcgtctgcacgccgtagctgcccccagagcgtacaaatgtcccatcattccacaggcagacgaatgagaactctgtaaagcattcccgtggttcatctgtgcggggcagggaagagagcccgtaatatgtacggctcgttttcttcggagatcctgtgtcagctcctgatactgccgttaaagcgcgccaaatccatataatactatttgggaatgagtttgtttgtgcagcaataacagggcctactgcttaagtcaaaattgcaaaaaaagacatgcaaaatttgggaatgattccaaaatagtgtggtttgtcaaaaaaagtgttgactttttttgatggcggctttatgttaaaaacatgttaagaaaagaggacgcggcgatactggttgtttatttttcacaatagagtgccagtgtttttttgaccttaaaaatgagaacgttttcaagagggcgtgggatacatacatggcagcaacaatcattgacgtcgcacggttatgtggttactcaaaggcaacagtttccagagcatatgcgtctccggaagcagtcagtgagaaggcgcgtgaaaagatatatgcggcagcgaagcagttgaactatgcgcctaatgccatcgcaagggcgatggttcggcaacagacagaaaatattgcatttattatccacgaaaagcagtatcccgctattttgaatcctttttattctccgatgctggaagcagccatgcaggagggaacccgaaggaattacagcctgttcgtaacgaccagtcaggatatccacctgcccaatggagatatttatatcaaaaagcacatggatggagtgatttttgctggcgaggttgatatccgggtcattgaagagtttcgtaaacagagcattccggtagtgttggtaaacaactatttggatatggatggcttagtgtgcatttcggcagatcactatggcggtgctgtgcaggctacggaatatctttgcaagctgggacattgtaaaatcggcctgttgtccggccggttttcaccacaagttagtgaagctcgtatagagggcttcgttaaaactcttgctaagtatgatattcccgttgatgatcgttttattgctgatattgagccggcgctggaagatggcgaggaaatcatgacccggatgctgcggggggtggatcgccccacagcttttttctgcaccaatgacaccattgccgcaggcgccatgaaggcagttacccgggcagggctgagagtgccggaagatatagcgatcatagggtttgatgacagctatatcagccgtgtggtggaacccgagttgaccactgttcgaattgatgctgctaagatgggatgccttgccatgcaaacgttatttgacttaattgcggggatgccggtagaaaaggcgcatattcaaattcctacggagcttatagtgcggggaaccgcttgatgctatgtagaaatttgacacgctcctgatagagcgttttaaatggtgaagtcaaagtgcggaaggatgtgatgccatgtgtgttacagtcatcaatgtcggttacggagacgcaatcctctttcagttaaagaatgggtatactgcactgctggatggaggaagtgccctggagtcagaatttgaaggcgattcttatcgcattcggtcagcagattatcttgccagacagcagattgagcatttgaatgctgtgattatttcgcatatccatgaagatcatgtatgcgggctggaggcggtattacagcagacagtggtagatcatctctatgttccgtacccggtagagcctttcttaaaaggctgtgaactgactccagccagtaacgctccccgcagtgtaccgctatatgttgcggccttgaatgcgtatcggaggattttgcttcatgcgaaggaaaaaggcattcctgttaccgtgttgaaagcaggacaggtactgaaatttggaatagacacgaagatgcggatactggcacccaaaagctgtgttgtagatgcatatatggagatcgtggaacgggcatacagtcttgaggcggatacaaatgccgtgactgagtgcctgatccggttggacgctacatccaatcacaccagtatgctgttgcgcttcgaactgggagacatcgtttttctcagcgcggcggatagctgtccatctgaatgggatgaggtgcctgaaatttttttcaaaaatgtaaacgttctcaaattgccacatcatggacaaatagattcaatttcggaatcttttatgaaaaatatgccgttggagtatattattacgacctcggcatctgatagacggtatcatagcgcgaatcaggcggtatatcagaagctggccgcaatctttccggcggagcatccaccacactttttgttttcggatgagcgagagtatccgccttatttctcacagcccgaaggctttcaggctatcaaacttgtaatggattccgggatggttataccggagtttattagaattcaatgaaaagaggagagaaaacaatgaaaaaactcatgtcgctggtcctcgcactcgctatgattctgagtttggctgcctgcggcggcaaaaccacgggaacgtcacctgacagcgcaggcgattcccagcaggaaactcccgcgacttcggacggcgctttccctgaaaagcagatcactattattatgccctggagccttggcggcggacccgataccattgcccgccaggttgcctcctatggtgagaagtatctgggtgtgcccgtgattgtggaaaaccataccggtggttccggaactatcgccatgaacgatgcattgcaggcggaggatgacggttataccatggtggttgccaacggccccttgttctcactgactcccagcttcattaatgtcaactacacactggatgatattacgcctctgattggtatgcgtatcacggagttcgttgttctgactaactctaagagcggcatcaccaatatcgacgagctgaaagcctatgccgcagaggggaacacaatcaagtacgctaccacaggcggccctggcaacgacagctatactatgatttccgtcctgttcaagttattggacatccccgctgagcctgttccctacgacggcggccaggaggccatcaatgcgttggtgggcggccatgttgacgtggctatcggttctcccccgacttaccgcgattatgtgatcaacggcgaattgaactgcctgggaaccttcattcccgaggggctggaggtggaaggcattggccacatcagttcctttagggatcagggagtcgacgtggacttcaccggcatggactactttgcggtccgctcctctgtggatgacagcaagaaggaagttttgaccaacttcatcgcggaggtttatgctgatcccgagttccaggaatttatgaaaggcatgggcatggaagcctgggaggccactgagagcgagatcgttgatatggtagaagctcagaccgaggcgatgaccgagtatattcctctggtgcagtgacactctgcggtgccccatatcgccgagatatggggcacccattttaaaaagaggtattgaattatgaaaatcagatataacagagaaataatatcgggcgctatttttgtggttctgagcgcagtgctgtggttcctgattcccgtacaggtccagacgctggagaaaacgccaatcaacgcacagaccttcccccgtatcgccattggtggtatgttcctctgctctgtcggtctgctgctggaggggatcttcgtccgggagaagcaggagttgtatgtgacgaaagagagttttcgctccaatgcctttaaaaaagaaatgcgttccgtagtgttcgcattgcttttgatcgcctactgtttcctgattggacatctgggctatattgtctccacaatcctgctggtactggcggtcatgatgttctataaagccagaaagtggtactactatgcgattcctctggggatggtgggcatcgtgtactacgtattcaaggtgcttcttcatatttccctgccctgatcgaaaaggagaatacttatggaacaatttttaggcggactgcaagttctgctgcagtggcagaactttttgattattccggtggggctggcaatcggtattattgtgggtgctatccccggactgacctccgatttaggtctcatcctttgtatacccttgacctatggcatggatcccacgatggctattttaatgctgctggccatctactgcggcggtacctacggcggttccatcactgcgattctcatcaacaccccgggtacctcggccaatgcggcaacgctgtttgacggttatcccatgacccaaagaggacaagcgttcaaggcactgcaaatggcactgtacgcatcaaccatcggtggccttataagcgcatttgccctactgtttctggctccccagatcgcaaaaatcacactgctgtttggccctgccgaatattttgctttggcagtttttggactatccgtgattgcgggcgtctctaacaacagtattttcaagggactgatcggcgcttgcatcggcttgttcatggctaccatcggcatggacaatatcagcggcaccgcccgctttacctttggaagcaatcggctcatgagtggtatcgacctgatcatcgccctcattggactgtttgctatctctgagattatgatgaagtcccagtatgatccaaggaccgaccacaagactatcagttcttcagccatcaccagagataaaatcacgaaggacgagtatcggcgatgccgcaaaccaatcggcattggctccctgatcggtgtcattatcggcgcaacccctggaactggcggtggtttggcggcgttcatctcttataaccaggtgaagcaatcctccagccatcccgagacttttggccacggcgagatcgagggtgtggccgcctccgagtccgccaacaatggcgcctgcggcgcaacgatgatccccatgctgacgctgggggtcccaggggacggcgccaccgctatcttgatgggtgcattcatgatccacggcatgatccccggccccacgctgttcgaagagcagggcaatattctatatgccattatgctgggcctgatcgtggtcaatgtgtttatgtatattctgggcagtggctttacccgtttttacgcgcatatcacccgtattccctacgagattttggcggctattgtattgaccttttgcattgcgggtgcgtattccaccaataaccggatgtatgatatctacatcatcctgatcttcggcattgtagcgtatttcctgcgccggatggattttcagttggttcccattctgctcggcattgtgctggggcctttggccgagaaaaacttccgccgggcactggtgctgtctgacgggagtctggacattttctttacccgtcctatcagctgtgcctttatcttgattgctgtaggttctattttgctgtttgcctggaaaaatcacaaggcaaaggtaaaaaccacacagaaataatacagatctgcgcaagtactgagacatctccttatttgagcattgccaaattcatacaatttgaagagcgacggtgtttgagatgaagaaaattttgaaaaggcttttctgcttggctatcgctgttgtgatgttaatgagtactgcgggggcagaaggaacctccacttatatggcttaccggtcaaatgccgttacaatatcagcagctgacggacttggcatcgtaagtggaacattcgtaataaaggatctcagtattacaaacgggcaagatcctgatggtcgcaactatgttggacaggtgcatacacttgaaaatggggaatttacattcagcgttgggcgcagtgcctctgaaagcgttgcatcatggttcaattcaaagatctcaggatataatgatccttctgtgaacggagatagaacaacatttgaccagactgctgatgatttgaattttgcctttgtcggtgatttgaatttggttgtggatactgccgatgatccgcagggtctaagtgttacatttcctgatgttgttattgctcaggggagcaccttgtttagaaataattggtggtttggtcaacgctctggccagcatacaagagatagtgacggccccgacactgtattggcaattggaagtacgacagagggaagaacagtttatgcatcgtttttgagaggcggcaacgaggttaatgagatttctctggaagccattcacgtggtagaagctgctgcggatagtgcgaataaagttgtcgatgttaaaaataaatttgctgcgcttccgattgatggtgttcaaagcaatttggaaggtttccccggcagctatgaccctaccgtaaatcatatccagggatatgcgcagtatgatagttgcgatcatactcgatattctattctgacgcatagtgtaggaactgcgccctatgcgcatattgtcgccggccccaaaacgggcagtgacaagtgggggttcaaaacataccttcagaattggagacatcctggtggcgttcaagtaatgggagattatctgttggttccctctgaacaagatgcttccgcgcatatagctttatatgatttgcgttcattggccgtaaaagaactaagaagagttgagacatttgacttagctgtaagccataaggctggtgctttggggattacttcttatgaggataaaaacggcattgagtattacgtgatgatagttgcccatttagatggcgagaatactgtgtaccatgtctatcgtgcattggcatcaaatggcattgaaaacgcccggttctccgaagttggaagttttgaatctgataaggactttcaaggttttggcttgattactgaggatgggacaaatgatatttatatgatagggctttggtcgccaagcgagggtgtgacatttgcggattatgcatacctgtaccagttgaatacggaaacatggaccattggagaagcacttcagcagattcacatggtcagtgttggaggaatggctggtatgatgggagttcatttccgttatggcgcaaatgtatatgttgcagacgatggtacgctaactttatccgctacagagcggaactcggttttgggcagctctttggcaacaaatgattggattcctgcaatcgtaaactaatatttgacgatatcgttatgtgaggaaagggaacgggctgtgatccgttccctttctccacagtgaatattctattgataaaccgcatgatggtggatatcttgttttgactgacaatgaataaaccaaagctgacccgtagtgcatagctgggggagaactacggcgaattggctcaaagacatcttcttcggttttttaagcagttgcgctaaagcttgcatgaagcaatctttcctgttcctttatgtaaatgcatggcgtcgagaaggtgtcatctcccccataaaacagactgcatttcgcaagagccgattggaacgtctcctgaccggcacgctggcagatcttctgtttattctcttaaaagatttctgctgtgatttgcttttcggctctgccgggcggggctttagaagtttttggctttccggccctttagagtgagcagcaaacaagaaaccgtcaagcctcttttgatgcttggcggtttcctgtttgacgcttatattgctataacaaatttcagggaggtgtcacgaattttgagaacttcaatcaagcgggaatgagtcgcttttcgagtttagaagtgatccgccatgtcctcacccgaaaacatcttaaagggaatccgagtttttaggatctgatcggctgcaatttacagcataccggccatcacaccggccaccaaaatagagaccattgcggccataccgcccactaccaggcgaggcatgacccggctcatcagaaaggccttttcatcctcatcctccgccacagcattgcatacctccacagagattaggtaagtggaggggaaccccagcatctgacagaagcctacgccgaaggccatggacttatcccccagaatcttccacaccggcaggactttcatcataacaaagatggaaagtaccgacaccgcgaacacaaccaccagcgggaggatcaggtcgatgaggtcggatatggagatgttggccagggcgggaatgatggcagcgaacaccaccatgttgataaaaccgctggcttgggctttctggaggaggttcttgggcaccacacccagctgggtgaagatcacgcccaacaccagccccaggatggcgtagttgatgtgggtcagctcacccagccatacagagagcaggccgccgactactgccagcaaaatgcacacattgctggaataaaagccgtcaaatttctcggccaatgttatcctcttggacgctgtctttgcctcgctgttccgattctcggatttgcccgcggcggccataaactcgtccagggtgccgctggatttggccttccggtattcgccgatcaggccctgggcatagcggagactggcgctggaggcaaagggcgtacccacgaacttctgcacggcgaaggtaatggcagccagcgcggcggccagaggatagccagccttggtggcagcctccgtcatgatctgcgttgcgggcagagcgccgttgactaccgggatggcgctgagggccatctccttgccgatgatagggatggtcagtgagacgccgatgattaccgccagcataccgaaccagcaagtgaccacagtccgccactcatccatgaactggcgcaggttaatcatggaccccatagcgaagagcagcattggcacgctccagctggaagcggcgctgagaccggccttttcgatgatgtcggcgggcaatacgccggcgacgaacaggaccaggaacagcatcagcgtggcgaacaccgaggagatccgggctttggtcagcttggccactacgtcgccgacagcgaagagaaccatcaccactgcgaaccacagcaacatatcaaacacttgtcattcatcctttctctatctgtttattgaaagggccgcccggcgcagccttttagagatactggtcgaaccagtcgcacagagcgttgagccggatcagacggttgaccggccgcccggaccggttgagctcgtggccctcctgatgaatcaggaccaccttggaaggaacaccctgctgacgcagactggtgaacatctgcaggggctcgtccatccagcagcggtagtcggtgttggagtggataaacagggtgggagtggtgacattgcggacgtacttcaggggagacttgtcccagaggatctggctctcgtcccagatgacgcctttccgctccagggcattgaggcccatgtgctccagcaggaacagataccccttgtcacaggtggagatggaggtgacaaagttggaaatgctccgcatggcacaggcagccttgaaccgctgggtgtggccgatgatccagttggtcatgtagccgccataggacccgccgcacacgcccaaccgatccgcgtccacgtccggataacggcgaagcacctcatcggtgaagtccatcagatcctggtaatcgatggtgccccaccgacctaccagatcgaagtaatcctgccccgaccgtcgctgccgtggggatttgtatagaacacgaaccgaccgccagcggccagcagctgcatctcatggtagtactgggaaccgtaggccgccttggggccgccgtgaatgttcaatacgccgggatacttcttccccggctcgtatccggaggggcggatgacccagccatccacctcctgaccgtcccggctgcggaacgtgatgtgctccggacgtgagatctggcgggtctccagaaaggcgtcgtggaattgggtgagcctctccggttccccgccggagaggggctggcggtacagctcctgaggccggtgatcccggaaagctgccagataggcgttctctccaatgatatcaaagcaggcaatcccctcataggaggccacaggagcaaagttccccgccttgtcgaagcgcagcagggcggtgacgtcgcgctggagacggacggcatagagactgtctccctggacggcacagaccttgccgccgcccaaagacatatccccgatggcggaggtacccaaaaaaccgtccggggcgcagaaggtccggcagtccccggtggccggattcagcagatagagcttggggcttcgggagacgctggtgtgtgggtcgccgccctcgaaccagatatccgtgccccaccagcccacctgggtgatccgatatttcctatcggggaccagtgaccgggtttggccggtggccagatcgtagagcatcagctgccggtagtcaggccggattccctcaaagctcacaccccaatagaggatccgagagccttccggagagactgccgctccttccatgtcataggtgggaggggtgatctggtttacggagccgtcggcaggatcgaaaatccatccgctcatccgggtgccgttaatcatccccagaccgtcggcccagaagggcagttcgtcaaaaaccgtatagtcacggccgggctgaggctggtccgcaggcaggtcctccggaggggtcatgggccgccgggtcaggacgaaccatcttccgtcgggcagggggtgaaactgctttaccgacaggggaatggtgaaagcccgttctgcttcgcttccccggatgtccagccggtaaaaggcggttttaccaggctgatccccggtccggcaggaggggaagatcagcgtatttgaatccagccagcgaaaagcggcctcgtcgccgttgccggtcagggggcgaacggcgccggttgcggtgtccagcagatggatgcaggcgtaatagccttttccatcatctctggcccggcgggacacaaaagctgcgtgagccccgtcgggtgcgaccgccacctcggagaggaatcggtatgcgtacaagtcatctgctttgatgcgttccataattatgcctcctgtttattgagataccgctggtaccagcggagcatttcctccagtcgccggagccgctgacggggccggccggagcgggagagttcgtggttttcccctgggaaaagacacagccgggagggaactccccgcagctggagagcggtgaacatctggatcgcttccagtttccagcagcgatagtcctcctcaccgtggaggaacaatgtgggcgtggtcacatgatcggcatagcgaagaggggactgctgccactggagatcccgatcctcccggtgggaagcgccggtttgccccttggcgaagtagtagccgatgtccgccgtgccctccatcccggtccagtttgcgatggaccgctgggagcaggctgcctggaaccggtccgtgtggccgatgatccagttggtcatgaaaccgccataggacccgccgccaacgcccaaacgggtgggatcgatgtccggccagcgggccagggctccgtccaagaaagccatgatatcctgatagtcgatggtcccgaaccggccccggatatcggcaaagtcatttccacggccctcgcttccacgggggttgcagaacagaacgaagtatccggctcccgccaggacctgcatctcgtgaaagaacaccgagccgtagctcaggcggggcccgccatggatggtcaaaatggctgggtattttttgccgggaacgtaggccaccggcgggagtacccacccctggaccggcagcggacctccggtatccacctccagcggctggggcgtggagacggcgcagcggtcatagatcccgtcgttggcgtgggtcagacggatctcccggccatgctccagagtgtagatctctccgatccggttttcccgaaacgccaggtacaccagccggtctgccgcggcatccaaatactccacactgcccggcccggtgagggggcgggcctcgccggaggtcagatccaaagcctcaatccggctgtcccggtccacggtggagaggaaatagagcgtgtctccgcagacgcgccaggtctctccggcaccaaggcggctgtcggtggccacggtgttgcccacacaatgatggctgtggcggaggagcagctctggttctcctccggagagagggatggtgtagaaatcgccattttccccatttccatagccaagcccgtcggtaagacagagaaccgcctggtcccgccaaagggcaaagagcttcaccagataccggtcctgttccaggaggcaccgggtctctccactggccgcgtcccagataaaaacaccgtggcgcagagtctggacatccgtgaagcgatgaccggtatagaggatccggccatcttccacggtaaagcctgtaaccttgaagggcggcgcggtgaggggggtggttacgccggacgcagggtcgtggatatacaactgggaccgctgcccgctggtgaggcccaggccgttggcccagaagggaatgtcctccagcacatcataggtgcggtttttgtattcctccagggccgaagcttcctccgggggactcagactgtccagatttgggcggttcatgtccacggtggcggtgaaaacgaaccgcccgtccgttaagcgccgggccctgcccgcccgcatggggacggtgaacaggggctgcgcctcgccgccatccaccggcagcgcgtaatatgtagtggtatcctgagaagcggaaccggctgtgcctcgcatcccggaaaagaggatggtccggttatccatccaagaaaaagcccgcaccggactcagggagctgaggggacggtccgcccccgtactgtggtcatagacccacagccgggcgtcatagccattggaggccaaattcgcctgctggcggatataggcagtgtaccgaccgtccggcgagagacccaggtcgctgagatatcggaattgcaggaatgtttcgcagatcataggctccatcatattcactccatttcgtcattgactacaaatttcatcctgtaccagcggcaccgcagatgtgtcctgctgccgggagaggcggcgtctggaaactggaaatagcatcctgattttaattatttatttttaattaaaaataaataattaaaaaatggccccatccttacaaccggcgaagcacaccttcgatatgctgctgtaaacagtgctgggccctcgtgatatctccggaacggatggactctactaggcgaacgtgatctctggctgtgccgctaaagtcccggagccgcaaagggcaaagcagatagttggacactagaaagcgcccctgtacccggtcatacgtctccagcagaatcctgttccctgacgcttctacaagcaaccgatgaaagcggcggtccaacatggcgaattcttttggagaaaaagaactgccggtgaggcggacaccctcttcactgtaacgattcaactgggctaatacggtttctgccgacagcccaaggccggacataaaccgctccagcgcatgtccctctaccatttgacggacttcacacatctggcgcacatgctcctggtcatactccggcacatagatgcggccattacccatgatctgaaggatcccgtcattggccagtaatttaacggcctgaaccaccggcgttcggctgacctcgaagcgatgagccagttcgtccaaggtcaggttttgtcccatctcataatcaccattaatgaggctctcaacaatatgctcatacaaaatttcgtccaggctattctttactttcatggaattcttcctccagttaaaataagtgtaatcgagaacagagaaaaaaacaatagggaatagaagtgtcatttattgggcggcgaaaattcatgataaattcacaaggggttacaagaaattattgttaaaaatgccaacaagatgctatatgcgtttgtttctgattcttatatctaccatctcgcttcacattagataggccttatcaaatatcctatccagccagcagccagtgtgatgaggatgaccacaacatccccgccgggaaattgtgcgagggaagagaaggtgtcagtccaaacagcatcaaaatccatgccaatacaaatggaacgctgtatagcatcagcgcagcttttccgacctttgcaaaaggacgatacaacaagttcagcttcctttccggcagcgccgccgccagcagaaccttgctcccgcctgtcccgatcagcattccaatcacggccccccggacggcatccaatgccagcagcctgacagccgcgggggtaatttttcgtgttgccttttgattcatggggacatccttggtttttatcccctcttgttatcggcggcattgtagcatgaatgaagagcgataggctggattttggccccagatgtgcgtcctcggctttaaatgcgagttagtcctatgcgttcaggacaaattgcatttattcaggacaaaacctttcaatctgatatactgcgggaaaagatggacaagaaaggattccgcctatggtaccgatcgttctttgcgacgacgatcccttcacattgcagcttctgtccgagctgctggaacgggcgatccggcaaagcaaagcagaggccaacttgtctgtctggcctctgctggtcaggagccgctccagtttatccgcagcggtggaagctatctctattttctcgattatgacctgggaagggattccccccaacggcgtggaccttgtccggcagatctaccacacggaccccggcgggaaaatcgtctttgttaccggccatggggagaagggcatggatattctgcgcagcggcgtgcggccctttgggtttattgaaaatgtgtggatcagaatgagatggttcgggagtatattcgatatttgaaaatggcggtgccggagcagcaaaacagcgcggacggggacaccgtcgaactgcccatcgggatcgatgaaacggtacggctgccggtttctgagatattgtatgtggattccgtcaaaacagtggcccattctatttgctgtcatttgacgggtcagggggtgactgcgcgggagacgatcgaacacgcccaggaacagctggaagatcaggttatccgctgccgttgctctgttttagtaagggacattgccgccgctgggcagttcaacgtttgcgataaaataatttttaagacgcagtgataaaggggctgcatatatacgcgcaagatagaacagaatttgtgaagacagcgcctttgcgttcctataaccttggtccgtggagatcggaatttacgaaaaaatacaggaattgttcaggatgccgttacagctgttgacattgatgatgagcgaaccgctctggtgcttgtcagtcttactcctgacgggaatatttgcacagaaagaacttattatgcgatgatttgcgagattgatgcgacggcatgtaaagttacatttcatgttactgacgacgtagcgtagccctcaatcaaatcctggtttacgattgaaccctatgggccgcagagtgcttgcggcctcattctgtttaaaaccgggtatgaaattgcgccctatccgagttctgggatagggcgcattatcccagatattcaattatccgaggtaaacttcaaatgtcgtttggtattctgggttttgaacagaaaatctcggataacgtttttcatgtatggtacagttaaagccactaaaataacgaggaggttttaaccatgtgtcaacagacaaacgaaaacgacattgcatcatgcaggtatcaggaactgaatcccgagatggatgcttttttgtcggaatatcttgaagacggacgacgtaaggggctacaggaaagtacaattcatcttcatgataagattggacattactttttatccgccctaaccagaatcggttgtgtgaaaccgcaggaaatgaatccccaaaatataggaaccgtatgcttatcagtcagcagcaagtggtatctttcccacatccggacatttctccggtatgcttatcagtccggtcataccgacagggattacagtggtattgtccctctttttaaaagaccgcagccatacccttctgtatacacaacagatgaaattctaaaaatcgaaagcagcatagaccagacttccccacacggaaagcgtgattatgcagccctgctccttgcgacgcggctcggaatcagaagcggggacatttcatccatgacattcaaagagctggattttgacagggacctgatcctgcttacccagcataaaaccagtgtcactattgaacttcccatggttcccgatgtaaaaactgctttggagagatatttacaggaagagcgtgccgacaatgaaagtccatatgtgtttctccgaattattccgccttacagccatatctcagtacaggcaatcactaagattgtaaggactgccattgaaacagcaggaatcgatccaggtaaacgcaagcagggagcacatgccttccgggcatcccttgcaagttccatggtcaatgacaacatcccttatgaagtcgtaagaaaaactcttggacatacagaccaaaatgccatccgttcttatgccagtctggacattgagcagcttcggggctacgcactccctgtaccggaagcagcaggtacatttgccggttttctggaaggaaggtggtctttgtcatgaatgaatttaaaagcattttcaaaaacgagctggcggaataccttgcaatcagccagggcacaatcagtgacggtactttacagaatacacgcagaatcctgctttcgttcgactcactgctggcagaagaaaataccggcgaaatctcagaaaggacagtgaatcgttggattggcagacttctccagactaacgcacctaaaacagtcagcgacaaggtgagctatctccggaaatttttaaggtatctccagtatgaaggctacagtgtttttatgcctgactgccctaaaacatcagacagctatgtcccatatattttttcggatgaggaaatacaaatgcttctggccagtgccgatagctggggcagtaggcacacagacccgcaaacgcgacagatggacatggagttctgtatgttactgcggatgcttttgggctgcggattccggttgggggaaccacttgctgccagggtgaaggatataaacttttcccgcggaactatcctgatccgccatgccaagaataacaagcagcgtgtcgttccgatggatgtaacattaaccagaatgctggaaaagtactgcattgcgatggcaatcaaaacagagccggaaagccacctgtttccatcggtcaggaaaaaaggggcagctgttacaaaaggaactttcggattacggttcaggaagctgttacagcaaaccaacctgtgtgtacctggaaaggctcattccagaggtcaatgtcttcattgtttccgtcattactttgccatccattcttttgtacaggcagagaaaaaaggacgtccggtaaatgattctgtaccgttcctgtccgtttatcttggacaccatgacatgaacgagactgagaagtacctgaaattcagcagcgacatgttccccgaatacacggaattgtttgaagactatgctgtcagcgtattcatggaggtgggcgatgaggaaaaataaacttcccgacttcatgcttctgctggaacagttttttacggaatatatgccgctctcatcaggtctttctcctaacaccgtccgatcgtataagcattcttttcggcttctgttccagtatgtttatcaagtgaaaaagaaagatgccggagaaatcgtgtttcaggatctcgattttgaaacaatcgacagtttcctgaaatggatcgaaacagaacggggctgctcggtatccacaaggaacctccggctttcggcactcacatcctttgccgcttacgcacagaacagaaattttgaagcggcgactgtgtttgcgaatgctgtaaggaggattcctgtaaaaaaggcatccagccagccaaggattattttttcgcttgatgaagtgtcagccctgctccggcttcctgacactgaaaaacgcttgggcttccgtgaccaggttcttttaaacctgatgtatgcaagcggagccagggcacaggaaatctgtgatcttaaagtcagagatttccttgttgaaaaaaatctgtacaagctgacaatcacaggaaaagggaataagacccgcaggattgtaatcgctaaacctagcggaatcctcctgaaacggtatctggaagaaacaggcagaactggacggttagatgcctatatcttttccagccagacacatccgcagatgactatctcctgcattgaggaaatttataaaaaatatgttgcccttgccaaggcggagtatccgaagatgtttcttgaaaagtgttataccccgcataccatgagacatacaaccgccacacatatgttagaagccggagtcccgatcatagcaatcaaaaactttctcggacattcctcgatttctacgactgaacggtacgcagagctttcccagagtaccgtgaacaggtatatccgagattggaacgagaaatggttttcacatcaaaaggaaacccctgctaatcagaaggaaaatcagttgcctgattttctgaaatagccattacattatccgaggatatttctttgaaagcctttaatatcagcaatatttaagaatttcctcggataattgaatatctgggataatgcggcattaaaacgcatagtccagcgaatagagtatgaagaagccagggaacggtgatcttttcagattgctgcaccctggctttttgttgtcaattgaaattcaaaaccgggatttcaatttttgtaatatagtcctcgattctgtcgatcaccagttcattgatcccaatctcataggcatagccggagaactgtaaatggtgctgctctgcgtagcggaggatcgcttcatagcgggcaggcagcctgtcccaattcccaatgcagaatgcccgcaaatagaccccgccggggcgcctgtggagtcccatcctgttctgcgtgtccggcagttcgataaacagcttggagtagtcctcaaacctccgggccaggaggttttccaccgggagcatggagccgtagggagtctggtacatacgcggaagctgatatttcttggtctgctcaagaatcagctcgatctcctcctccagggacttttccggtgatgtttgcaccgtcgccagatactgcggttcccgctcaatgagggagatctcggagaggtccaggtccaaaagttcggtcatctcctggcggcggctgcacagttttgaccggacggccttcagcccctggatcgtccggtccagttctgagattttatcccgaagcaggtccgccatgctcccagcggacctgtttttcataaattcctgaatatcccggatgggcacgttcatgtcccggagcagcaggatcacctccagctccgtactctggtaatagctgtatagccggtacccattttcttcgtggataaacgcaggcttgaacagcccgatctcatcataccacatgagtgtctttttgttgatcccatgcagagcggcaaactggccgatggtaaacagcttcggtttttcccgcagcattttcaaaaacccccttgaccgtacagtaactgtagggattatgatactccatgccggtaactaccacaagaagcaggaggaatttccgtgcagaatgaaattgcatacagcagacccgtcaccctgacaaacattcttaaatttgcagtccccaccatcgccatgagcgtattcatgtccttctatacgatggtggacgggctgttcgtctcaaacctgatcgggaccagtgccctgtctgccctcaatctggtctatcccgtcatcgcgctggtgacggccatctccaccatgctcgcaaccggcggcagcgcggctatcatgagaaagatgggagagggaaagcccgatgaagcaaagcaggactttacgtttctgatcctggtcaatgtcctgaccggccttgtgatgtgcgggctgggctatctgttcatggggaagatcttcggctccatgtccctgtccccggaggtctccgcctattgctgggaatatctgagccgttacctgctgttcaccgtccctattcttctgatgaataacttcaccctctatatgatcgcagcaggcaaggcgtccctttccctgctctgctccgtcgccggcggcgtgaccaatatcgtgctggactacctgtttatcgccgttttccgctgggggatcggcggggcggcggttgccaccggcctggggtactccatcacagccatcgtgggcctgctggtgttctccaaccggaacagcctgctccattttgtcaggccggtctgccggccccaaacgctcgggagagccgtcacgaacggctgctctgaaatggccaccgcgctggtcaacggcatcatcacgctgatgttcaactggacgatgctcaaatatgtaggggaggacggcgttgccgcaattaccatcatctcctatgtgctggcctttgccgggtccctgtatgccggttatgcctacggggtggcccccatgctcagcttttattacggggaacagaaccatgagaagctcaggaagctggtccgcaccagcctgaaaatcatcggcgcgatcgcggcggccaccgtgctcgtttctctggctgtcacagagccgctggtgtccatcttcgcccggcccggaacacctgtctatgacctggctgtggcaggaaaccggatctgttccctggccctgctctttgtgggcttcaacatttttgcaagcgggatgttcaccgcactttccaatgggctcatttcggcagtgctggcgttttcccgcacctttgtctttacactgatcgccatgctggtcctcccggtcattctgggcgtcaccgggatctggctggcgacaccggccgcggagctggcggcagtcgtcctgtccgccgtcatgctcctgaaataccggcggcgctactgctattgattccaggggggagtattttgaagctggtgattttgctggccgtaatcgcaggaaaatggcttctgtgcctgtggagcggcctgggcctggttttcctgctcttttggctgaaagggaagcagttcaggggtaatagcgaaaaatgggacgatttctttctcaccctgccgccgcaaaaggtggagcagtacgcgattggtatttatctggccgccgcgctgctctcgtccggcatcagctattgtgtcctgaaatgggcgggcttccagcacagtcttttgatcgcaggtgcgctgtttgtggtcggagccttgattacagagtaccggtggttcacaaaaaagcgggactatgtgctgaagcggtatcaggagatcccgcagacgattttggaaagaagaaatggagaaaacaaaatggatggacagatcgtattgagagaataccagacatcagaccgcccggctttgatcgggatcatccgggagacgtggcagtatgacaagtttgcctcccccaaggcggcgcagaagctggcgcgggcctatctggacagctgcctcaccaatcagacctttacccaggtcgcgctggtggatgaagtcccggtggggattatcatggtcaaagaccgcagggagaagagatgcccgttccgcctcagactgcggatgctcctctccgtggcgtcgctgttcctgtccaaagaggggcgtatggtcactaggttcttttccggcgtggaagagatcgaccagcagctcctccaggacacccagaccgagtaccagggagagattgccttctttgcggtcaattccagataccggggcatcggcctggggaagaagctgtttgatgccgcgcgggattacatgaggaaccggcggatcagcaatttcttcctgttcacagacaccacctgcaattacccgttttatgagtgccggggcatggagcgccgcggggagcgcgtccacacctttgcggcaaagagaaaatccgggaccctgaccatgtttatttacgattccttcatagaatgttaagacagtttctgtcgttttccccttcacgtgtgataaaatgcctttcacggctcaacgataaagaggtgtcttttacgaaatccagacagcgtattctcttcctgaccgcagcggggcttctgattgtcggaggtggatggttcctatactccaccggctttttccaggcggcgtcctctcaggaatccctgcgggcctacattgacgactttgcgccatactcccacctgtgttttttcctgctccaatttctctctgtcgtgctggctccgatccccagcaatattaccgctgccgcgggcggtgttctctttggaacatggccttcctttttcctcaccttcgccgcagtagtcgccggttccctgctgttgttctggttggcccgggtgctgggccgggactttgccgggcgttttgtcagccggaggctgtctgaaaaatatcagcagatcctccagaccaaggctccggtgttcctcactctggcgttccttttcccctttttcccagacgatcttctgtgcatcctggccggcctgtcctcgctctcattccgttgctttgcggtgatcgtcctgcttgcccgcccctggggactgctctttgccagcgccctgggcggcgccgcctttcatgtctctccgtgggcgatggttttgatcggtgtagcggggttagtcctgtttcttctggggatgaaatatggggatcagatcgaagcggccatcctgaagcgcctgtcccggcggaaaggcaatgatgcggcctgctgattgcggcagaggttccggcctctttggctcaatgagaatagcgactgtggacagccccaacaaggcggccgcttccggatttctggcggcgctgtcttgttggggcgtaatcctgctttgagacaactgggattgtgttgggccatggggcggcttgtcttttatttgaacttcccctatactataacgatggatatattttgtatgaaacggagaatttggtgattcttgatgaataaaaaagatttgaaaatgcggccggtaggcaatgagtatctggaacaatataacgccctgctgcgctatgtattccaggtgacggatcaggagctcagttccgtgggctggcaggagaaggagatcatccgggcgaaatttccaaccatgcagaaagcggacgtgatcggctggtttgacggcgacaccctggtttcccaggtggcggtctatccgatgcgcgtcaaggtttttgggaagacctattccatgggcggcctgacgggagtggggacctacccggaatactccaatatgggcctgatgcacaagctgctggagcaggccctgaaaaacatgagggagaaaaagcagtatatctgctatctctacccctattcgatcccctattaccggcgaaagggctgggaactgatctcggacaagatctcgtatgagatcaaggactatcagcttccgaaaaaccaccaggtcgccggcagcgtgcgccgggtgaaggcggacggcgaggaactgaaggagacctacgcccgctttgccgagcatacccacggagccatcctccgggatgagctggcctggaacgaatactggctctgggaccgggacgatatcatggcggcaatctactataacgagaatgaggagccggacgggtatatcatctactggatcgaaaatgaagtgttctatatcaaggacatgattttcaatcatgaggaggcccgcacggggctgtggaactttgtttccgcccacttctccatgatcgaccgggtggagggcagcacctatacggacgagccgctggccttcctgctggaggacgccagcatcaaggagtccatctctccctactatatggcgaggattgtggatttccccgcgttcgtcgcggactatcccttcaaggcggacggtacggagcgggagtggcgcttctccatgacggacccaatcatggagtgcaaccagggctcgttcctgctgaagatatcaaaggacggcagggggacggctgtgaagatctccgagccgtgcgccgacagcatcagcatccagaccatgacgaccatgctgatgggctataagcgcccggactacctcgccaaaatcgggagaatccacgccggcggggagacgattgacatgctggaggacgcgattgagcagcagccgccctatatatccgactatttctaagggccggaatatcattttttcagactacttccacaaaggcaggtgatcccccgctatgcagaaagttgatttgctggagggctccattgttcggagcctgaccagtttagccctgcccatcatggccacgtctttgatccagatggcctacaatatgacggatatgatatggatcggccgcgtatcagccaatgcggtggcggcggtgggcgccgcgggaatgtatctgtggctcgccaacggccttgccatgatcccgcgcctgggcgggcaggtcaaagtggcgcatgagctgggcgcgcaaaatatagaacgtgcggcctcttatgggcaggcggcattccatctcggggccttgctggtggttctgtttacaacgctttgtatcacactcaacgggccgctgatcgcatttttcaggctgaacacgccctctgtgatcgcggacgcacgcacctatctggtaattgtggcggccggatttttcttctcattcttcaatcagatttttacggggatgttcaccgctatggggggaagcgtggtggttctgcgctccacggccatcgggctggtggggaacatcattctggacccgcttatgatctttgggatcggcccattcccgcagatgggcgtggccggagccgccacagccaccgttctggcccaggccatcgtaacagccatgttccttctggcagcccgccgcgagatgaccgtttttccgcaaatccatatattccaggccagtcagtggagggcctgggcggagattttgaaaatcggtttgcctgtctccatccagagcatgtttttctccggcctctccatgatcctcgccaggctcgtcgcgggttggggggacgccgctatcgcggctcagaaggtcggttcgcagatcgagtccatctcctataccacggcggagggatttgccacggcggtcaacgcatttatcgcacaaaacttcggcgcgggccggatggagcgcatccgtaaggggtattggacagccatcggtatgatcgttgtctggagcggcttcaccacacttatgctggtggtctttcctgttccgctgttccggatattcattccggatgaccacgtgctgcagaccggcgtgagctatctgcggatcatgggttactcccagatcttgatgtgcctggagatcacctcctccggcgcgttccagggactgggccgcccaatgccgcccacgctggccggtatcatcgggaacgccgcccgcatccctctggctgtattcctcagcgccacggtactggggctggatggggtctggtggagcatcagcatctccagcattgcaaaaggcatcgtcgtgttcacctggtttgtggtgatcctgcgccgttatacacaccggcaggcgcagggagttgacggactggagtgactgtccgcaggctgattttgggtattgtgccaggatacaatgcctcgaaaatccaccggcaggaggttgtacggttgcgggatattgcataccaagcgtttcaaaaaggaaattgaccttgcgctgctggggatcgagaaatgggcggatgaccgtgcctatttctgcacacccagaaaagccgggatcataggcaggaacggagtatccggagcactgtgccgccatgagttataccgttacgctggaactgcaggacggcgctatgacccttgcggaccgcggcgacggggatcgccccagacaggcgccctgcgccccggatcagccgaagactacttcgtatgtagcagggagcgggtttatcggcggtgcggatggcccggcatccgcttttgttggagaggagcagggaaaacttcggatggcctgttccttgcttcgtttcggcggagaatgtggaatagcggatgattttccacgaaaagcagtttgaggacatgaccctggagtggactccgtcaaatgaggccaagcattccatatctggaagatagaatacggctgaggtgcctgcgctgttagcgccgacgtgacttgaccaaaagagaggtggaaaaatcctagaccaaaatgagtaactaagtatgggacagggcaggtttctatatattttcatcctctggtcaacaattcaagacagccgctgtggaggttcccacagcggctgttcgttatgattgtcaactccgtcccgttctggcattggcaaaccggtcgactataaagttatatacataatagaaaaggacgccgaaacaacacccgatgatgttgtttataatacggaggataattgctgattttaccccaaagatatttgtagccataagaagcgcgccaaaacagttcagaagggttttccaatgataggcggcgcagaggccgagcagcaatcctgaatagattcccagatacgagtgggcggaagccggaagcagttggtatacgatcccaaataaaacactcccagccacgacgccgcccaggcgttgaaatgcccgtttgtttgggcgctcgccatattgcgataggaccgtcaggcaggcacagcccacccacatgatccggtctacctgaagtagttctccgacaaggattccaagcgataatccaagcgtcacctgaaactgccattttccgaggggatcaaagagggaaaagtctttcacgatctgcgagaacgttttgccgtaatctttcttcctgtgattgatgtagaaaatgattccgcacagcaggcatcccagcagcatttcgaatacccggagcacgagcagatgtccgccaaccggattcccgtataggaacatataggcaaacaggtacaggcccgcccctccgtataacggctcgtggcaggcggagatcacgataaagccgatgctcaagaagttgatcagaaacccccacgccggatttacggactgcgcaatgcaagggctgaaggtcagcagcacaaagacaataaagaagtttatcagggagcttttgaggcagtagccgaagtcaacaaaccggaccgtcagcagaatgcagaagattaccacggcggcagagctgttttcatctccaaacagaaagtttagaatagaaataaaaacgactgcaaagagaacacagaggatatccttcacaatcaaggccgcaatcaatttgtgccgttcagacggattcgctgcgtttctgattttccccttacatacagagacatctaattgcatcgcctgataaaagttcatctggaccttcctttctcagagcataatcctatcatatccggcggggaaatcaagaacgtagcctttgtaaaaaaactgtaaacagttccggccattgggactgttaaagccgatccgaattgatgaaaacaggcggcgccttcccttagccggaacaaatcagaaaatttggggagtcactgtcaacggcgtgggtgcaagggagcgggacagggtacttacagcttcagcttcatccggtccgtctgaatgcccctgcctgattagaacagagagttgtcgttgttctgatcggcaggggcgttttgtgtccgaagccatttctgcgcaatggctttggacttttctgaataggagtcctatgttgcctgctaaatacaaacggagcaaaatgaaagcgcaaaatatgaaacggatgcggcggccggactgtcgctccctcgcaccggacatccttcgcagcaacgcatcagccatggagtacaggccagctccggcccactcttttaaaaaatgtttgatctgccgggaccttcctcttaaagcggcagaaaaccgacgctggcaggctgcttgaagttacgactgcttttcaaatagaggatagttctgcgcatctcctgaaaaacggcaggaccttattttcctgctgcatgaatacctgccggaagccatttccaccagttgtacatttccgggcgaatgcggcgcagggtcattccggtcactgccccatcgaacatggggaagttcctgtatagaaaggagtatcagccgccgcaggcggctgattacacacgtacagcgaaactcaccaaaagactcgaatgacaccgcaggtcacggtggtggtaatgattccggcgatgaggacgccaagcgcgatggcggggagggctgtccggagccggaggtccagcacatcggccaccagggcgccggtccaggccccggtccccggcagcgggattgccacgaggatgatcaggccgatggtgcgatactttttcacgattcggcccttgaggtgtgcccggcgctccagccagtcgattttcggtccaacccagctggatttgcgcagccagtcaaaaatacggcggagcaaaagaatgagaaaggggattggaacgagattgccgaggatggcggcagccgccgctgcggctggcggcaggccggcggctataccggccggaattgcaccgcgcagctccagcacaggcaccatggcaatgaggaatgtcatgaggagctcaccgaaaaaagtatcaaacaaatccatagactacaccttttgtataacaaatgtaacgattgcattctaccatagagcgccagatgcagcaatgtttatttttatctgtacgaaatcgaaacatgtatgtgggcggtaagcaatagagggcagacggtacagccttaccctaaaagaagaacggcccaaaccgggaggggggtcgggaggaacatctggcaagccatacattatatatattgggacagagcgtatcaaagtgcatggatcgcagacgatctgccggaatgttacggttatattacaagagctgcaaatctattgcaaacagaaaattgatctgatatgatgcgtctagaacaaatgaggaatcgctcttggctgcccggtacagatacaggaatggctagccacggtatgtgtaccgtgtaaaaaagaggcttcactcaggcgttctgaacttctaaagccgaacgctcaccgaggtagtttggggggggccgcgtttgcggagtgtatctctccaatttgccaaaatgagggaacggcggaaatttaaaggaggtaaacacccaatgaagaagttcctttctctggtactggctctggtgatgaccatgtctctggtcaccgtcagcgccggtgctaaggacttcagtgatgacgacagcatcacctatcaggaagctgttgacgtcatctccgagattggtgttgtcgacggttacaccggcggcgacttcaagcccactgatgtcctgacccgcggtgccgccgccaagatcatctgcaacctgatcctggggcccaccaccgcttccgctctgagcgccagcagcgctccctttaaggatgtgcccgtgagcaacaccttcgcaggctacatcacctactgcgcccaggagaagatcatcaacggctatcccgacggcaccttccgtcccaccggcaccctgaccggcaacgcgttcatgaagatgctgctgggcgccctgggctatgacagcgctgtcgagagctacactggtcccaactggtccgtggccgtcatcaagcaggccgccggtatcggcctggacgacggcaacgacgagttcgtcggctccaaggccgtgacccgtgaggaggctgccctgtacgccttcaacatgctgcaggccaccatggtcgagtacgacgccaagacttctgtcgacatcaacggcgctaccgtgaccatcgccggcgacaaggccaaggagatcgagaacacctctcgtaccgacggctacatcgacgacgacaacaagatgcagttcgctgagagatacttcaccgacctgcgcctgaccaccgacaccaccgatgacttcggccgtcccgccaacacctggcgcttcaagggcgttgaggttggcaccttcgccaagaccgctgacgccacctacaccgccgacgtgaagctgggccagatctactctgacctgggcatgtccgacaaggacgaggctgctcccgtcttcgtggacggcgttgaggccagcgagtccgccaaggtctccaagggcaacgacctgaaggtcagcgagctgaagttcaccaactctcccgttgcgaagtgcaacgtcggcaacggcactctggtcgaggcctatctggatgaggataccaacgatgtcaccatcgtggctatcaacacctacgtggctgaggtcaacaaggttgtggccgagaccaactccaaggatgcttacatcaccctgtccgagctggctgctgagaacggcgccacctccggcctgcgtgccaacgacgagttcgagaccactggtttcgagaacgaccagatcgtcctcttcacctatgccaacaacgagatccagtctgtcaaggctgctgagtccgctgagggcactctgaccagaaaggtttccggcaagtccatcaacctgggtgagaccaagtatgacttctccaagatgtattctgtggacggcggcgagagcagcctgggcatcgacagcgagtatgtcgtgtacctggatgccaacggctatgccatctacgtcgaggagactgagtacaacatcgctgactacgcctatctgcgcgctctgcagggttccagcgttgctttcgcctctgacaaggccgctctgatcacctatgacggcaagatgaagaccgtcgacaccaaggaggactacaccaacgacttcgctggctatggttctgagctgcagattggtaatcccaaatctgagattgtcctggtgaaggagacctccaaaggcgagtatcgcctgaaggatctcgacaccaagaatcccagcattgctaaggccgaggactccttcgagctgcggaacggcgtggcccggatcaacctgactaacaagggcgtgaccaacgcctccgatgccaagcagggcaccgactacatctatgccgacagcaagacggtgttcgtggtgggcacctatgacagcggtgctcgcgagaattggaaggatgctacctatcgcgcctacaccggcatcaacaacgctcccaccatcgtggacgacaacgacagcagcccggctaccaatgccatcggcatgagctactactgccgcaacaagggcgttgccaccatcgtgtacctgagcgtggacgaggctgactacaaggtcaccggcggcaacaacgacgtgatcttcttcgccttcgagtccggcagcaagaagatcgaggactccgacaacgagtactacacctacaacgcagttgtggatggcaagatcgttgagggcgtcaaggtcgatgccagcgtgaagatcgacaaccgcacctccaacggctccttcagcagcaacgtggtcttcactggcgccgattatgacgacggtgtgatcaccggcctggacaaactgggcaactccggcaccgtcaccggcatcaacaaggtgaacaatgagaacgtcgtgcttggctacggcaacggctctgagtccacctatgtggtcgccgacgatgcgaagatcttcttcatcgacgatgacggcaccattaccgagggtgcggtgagcaacatccgccgctccgacgaggatgtcgtgacctacgtcctggaggatggccagatcagctatctgttcatccagcagtacttcgaggataacgaccagtcctcttccggcggcagacaggagctgaccagcatcactggtgtgacctattctgctcccaacctgaccctgactctgaacggcaccaacgccggccagaactacaaggtcaccctgaagatgatcgttgccggtgtgaccactgagctgggcacctacacggtcaccggcgccaccggcgctaccagcaccaccgctgtcctgtccgtgggcactctggccagcatcgctgccagcggcggtatctacatggtctcctgcggcggtcagaacgcaacgttcactgcctaaggaactgtgtcaacgtgctgatgcactaagacaaaaaggattcccggacttctgtccgggaatcctttttatgtgtcaggcatagtcaaagccggtcggcacgccctctgatagcttctctctgcacggacacacggcttgcgaggatttgcacaggctttggcccagttggcagaggaaacgaactggtgaatgagccgttccttcgccgccagcaccggaagagtcgaaggtcccccggacttttgtccgggggcgttcctttgggttacagtttccagccccagaggatgattttcccttccccgttgatggttccggcgtccgtcataaagttcagcgtcttcaggtccttcggcgcgatggaggggatggtgctgtaatagggcgggttcgatgtatcatagatatgctcacagatacaggcaatgggggagagataagttgccagacggatctttgctttgccttgacccaggaggccgctcatctccaggcggcacaggtagttttggtgcgtgcccggatggaaatagctgtctgtcgcaatattgttgcagcgcagatagatatagtgataggctgtggagaggatggggacgatccacacctccgtgtactgcgtgaagtcgatctgtgatacatccacatccacctgcgctgcttcctgcgtgacaggcacttccagaagttttaccagtggacggcctcggcggctgcggctgcctcccggcggatggcggcatcctgagccgttctcgcctgctgctccgccgcgtccgcggctgccagggaggccagggctgtctccagcttctgattgtccccgttgaaatcctccatccggatgcggtccgtcagctcccactggttgagatgaaattgactggtctgctgcaaattcttcaccctttcccgaaaattgtggcgggaaaactcccgctatccaatcccccctgaccggaagaaattgcagaatttcgtgcaacaaaaaattcccccggaccgaagtccgggggaattttcaaccgcgggtacaatcacccttctggcgggtaatcagacacccaacacaaagctctggtcgccgcaggtcaccatgtaggtggagcccgcagacagagcggcagagatggtggcggtcgtcgttgtcgcggcgccagtcacgttggcggtcgtcagcttcaccagggtgccgccgttgaccagggagatggtcacggggtagacctgtccggcgttcgtgccggtcagagtgacagtgacggtgccgctgctgtagcttgcgctgatcccgctcaggaccacgccgctgctaccggcgccctcctgcttgccgttgtcaacttcctggatgaacaggtaggcgatgtcgccgtcagtcacatcgaggaggccgatgtaggtagcagtggagtcggagctgatgttcttcacatcgtcgatcttggtgataacaccatcggtatcgatgtagtacatcttggcgtcagaggcaaccgtgtagcggacgctggcggaagccgtcgtgccgttcaggccgatgctgtaggagccggagagcttccacacgccggtgcccttgagggtggtgtaatcagatgtggagatatcatcagcggaggtcagcagacccttgttgttgtagtcagcattggtcacaacctggttgaccgtgtcgttgccagccacgaccacagagccagcatcctgagcggccttgaccttcacggtggtgatctcgtcgtccacaactgcgttgtacaggtagtactggttgttgtcgccatcggtgatcatcttggtggcggactcagcagccaggaacaccacatcgcgcttgccgttggtgacataggcgccggtggcgtcgatgaaggcgaaggtcaccacatcgctggagccgctggtggtgtagaccatctcaacagccttggtctccacagcgggagaggtggtcggatcatcagacatgatggtgggagcgttcttgatgcccttgtagacggaatagtcagtcttgccgcgggcatcgctctcagccaccacgaacacggtctcactgttgccatacaccgtagtgccggttttggtggtgatagccgcgcgggtgttcttcatctcgaaggtgtcagcgccgccggacagaacgccatttgtagcaatgctggcatcggcagtggtggtgatggtggggttgccattcttatgaacattggcggcctgacgcagagcgtactcgcccttgtcgtcagcgcggtagtagacgatggtgccctccagagaggtgtaatcgtcgtcagtatccaccgtcttcacggagccgtcggacatgaccagctgaacctgatccttgccgaagcggctgttgctgctctgggtgtagagcacatacgcgtactgagaggcgtcgaactcctgctcatccacatagatgaccatgccgttggtatccagatagatgacatagtcgctcttggtggtcatgctggtctcagagccgaaggagaacgcaatgttcttggagtacttgtactcggtatcggccagagtcaggttcttgcccagggtgtacttgtcgagggtgccctccacggactcggccttcacaacggacttgatctcgtccgcgctctgggagtaggtgaacaggaccacatcgtcttcctcgaagttgtcggtattggtctcaaagcgggccttgctgccggagatggacacagaggtagaagcgtccttctcggtcacgaggctctcggagttcacgacaacatagggatcggagaccttctcttccttggaggagatggtgcccacataggtgtcgatgatgcagatggtgacatcgttgttgtcctcatcgtagaagacctcaacggtgctgccgtcagccaccagcttgttgttggcgctggagctggagaccttgacggtgttgcccttggacacggcaacatcatcggcctcgacgccgttgtaatagacctcggcgttcttgtccttctcgctcatgtcgagatcgctgtagatatcacccagcttcacgttgctggtgtaagtcacatcagcggcgtccgcataggtgccgatcttgtcgcccttgaaagtccacttggtggcgggacgggcgaagtcgtcggtggtctcggtcttgtccagcttgtcgaagtagcgctcggcaaactgcaggttgggcttgtgcatgttgttgtcgtaggagccctgcgcaacttccttggccttgtcgccggcgatggtcacggtagcgccgttgatgtcaacagaggtcttggcgtcgtactcgaccatggtggcctgcagcatgttgaaggcgtacagggcagcctcctcacgggtcacggccttggagccgacgaactcgtcgttgccgtcgtccaggccgataccggcagcctgcttgatgacggccacggtccagttggcaccggtgtagccctcaatggcgctgtcatagcccagagcgcccagcagcatcttcatgaacgcattgccgctcagggtggcggtgggacggaaggtgccgtcggcgtagccgttgatgatgccctgctgagagcagtaggtgatgtagcctgcgaacacgttagtcacgggcacatccttgaagggagcggtgtcagcgctcaggtaggaagcggtggtgggccccaggatcaggttgcagatgatcttggcggcggcaccgcgggtcaggacttcagtgggcttgaagtcgccgccggaataaccgtcgacaacgccgatgccgctgatgacgtcgacagcttccttgtaggtgatgctgccgtcatcactgaagtccttggcgccggcgctgacggtgaccagagacatggtcatcaccagagccagtaccagagaaaggaacttcttcattgggtgtttacctcctttaaatttccgccttccgctcccgttttcgtttggagagatacactcctcgcacaacggcttgcggcccttgtgggccagcggttttccgaacaacttcggtagcattttgagttttcatgctaccaaacggctgcaaagcttggaaaccctggaaagtctggtagcaaaattaaagatttggtagcagccaattatggaaattttttgatgcatcagatcagccgaggattgtgatgacatccaatgcgctttccggtaccgctctttctctgaatgatttggtctgaaaggcgggcccgcgctttcttgaaacggatgtcacatcgttgaaaaataaaaatacacaggcattccgcccctcgcagaggtggattccctttgtccggactgcggactgaaaagcgaaggatgattaaaaatgagtgacaaatataatctgctaatttgatacataaatgaaaccattggaatagacaatgaacaagaaatctgatataattttgcgcggtaaaagactattctcgcgagaggagcaatttcatgaagcgaaaaaaaaccgtgccggcagaggtggttccaaaaccggtgaatgatgcggcgcctgtgccggagaaagaccatccgctgtatgaccgcctgtttgttgtgggatttgcggtgctgctgttttttgccatgacggtgcagacggttcccatgagcctgattctggcggctgtggcattggcgctgtcctttggcagggggggctatgcacggtttcgcggccgcctgggaatcccggtcctggggtttctggcctttttgatcctctgcggggccgccagcctgtatacgagcttcggcgcctacgcttacggagaatatgccaagctgctggcgtccggagccctgggcctgctgctgttggcacgcggacgggaacagaacgccggcggactcctgttcagcttctctgccgtgtgcggagtgattgggcttctatgtatcgatgccgggtgccggggaccgctctttcgcggctttgcctcttttatggaggggcttggggatgcagcttatcagagcctggatcaagcgacctatacgggcgcccggtttgacggcatctataacgacgcaaacctgaccggcagcctgatggcgctggcggtcttggtgggactctacctgatccgtacaggacggaaaccgtgggagcgatttgcggcctgctttctgaccggactgtccgcagtggccttttttaccgcgatgagccgtggtgccattctctgctttggcgcgacagtcctctgctatctgttgtttgtgggaaaagggcagcggggccagctgttcctgctcctgtttttcacggcgttatccatgggcgcattcggtctgctgtctatgacgctgctctcctccggctctgttcttgggacattggccgcgttgccatgcggacttgtgctctggggcctgtatgaaggtttgggccagaaggcggcagaggttctcaatggacacccccgcctgatcgcggggattgctaccggtctggtggtgctctgcgctgcgggaacggtggccgcttttacgctgacggagcccttcgtctgcacggaggaaaatgttctttaccggggcgcggacgtcacctccggggagacctataccatcaccggcgactgggacaacggcgatgagatcactctgatggcctatggctccacccaggcgcaggagatggaaaaccggacggagacttattacagcggaccgctgtccgaggcctcctttaccgtgccggaggggattacccgggtactcttccagttccggggaccggaggggactcagatccgctctctgtccctctccgacggtacgaagatccccacatcctatacgctgctgccggaaaacctggtgagccggttccagaagaatctgtttcaggaccgcagcttcctgctgcgggtgcagtatctcaaggacggctggaccctgtttacgcaatcaccgttgacggggcacggcctgggcgctacggagggtctgctgacctcggtgcagcccttcttctaccagtccctctatctgcataaccatatcctgcaggtgatggacgagacgggtctgctgggtcttgcggcgttcctggcgctgatgctgggtgcggcatggctgctggtgcggcggctgcggacacagcaggatggtatggctgcggtattgcttgcctgctgggtgatgatgaatctccacgggttgatggagatctccttctccgtgcggatgttccagtgtgccgcgtttttcctggtccttatgagtgttgtctcctgtggggagcccgcggaggggagaagcggcgtgcggatcctccgggtcgtagggaccctggccgccgcactctggctggtcgtttcctttgcgatgcttttgggcagccagatggcacaggcgcaattcagggacttcgatacgacggatatgacccggtcggaattcctggacagcatggaaaagctggatcggatggacgcctataccgatcaggattataaggtcaaccggatggtcaatgcactgcaggaggggggcagcctcaatctgggtgtggcgtcccgctgtgcccgggaactgcgggagaccggggactttgacgcttgttataaagtcgccgcttactattatctgcccctgcaggatctctccggcttctttgagatcatgcaggagggactggctcaggagcggtctaatgccgatgcgtggaacagtgcctttgatctgtacggacaggcctttgcgcaactggacgagtcgcagatggatgcgtttgtggcaggcgtcttggcaaccatggaacagatggagcaggccaacgagtatttgctggttccggtggcgctggatgaggccaatcaggctctcgcggatagtgtgaccaccgtggagacggaggacctggatgcctctgccgcgtatgcgctgctctctgcggtatttgccgggcagcaggaataagtggaaaagaaaacagaatggtcctgaatccatcggaactatcctgcttttacagaattatggcaaaaaggaaaaagaataagccggaaaacttatcaaaagttacccaaaaacttgagctgcgtcgaaaaatgtgctaaaatataagctgattaactaggaaaaatgacgagaagatgttttctcattcagaagtttatctgtgggtagcatctagaatctgggaagtaccgccggactggcgtgcgatacggacccagccggtcaaatcaaaagcaggatgtgttgtttatatggaaaagatcccgttttccccgccggatattacccaggcggagatcgatgaagtggtggataccttgcggtccggctggatcaccaccggtcccaagagcaaacagtttgagcgggagatcgcggcctattgcggaacggataccgcggtgtgtctcaactccgctaccgccagcctggagctgacgctgcgtgtactggggatcggccccggggacgaggtgatcgtaccggcttatacgtatacagccacagccagcccggtatgtcatgtaggcgccacgctggtgatggtggacagccagccggactgttatgagatggattatgcacagcttgaaaaagccattacgccgcgcaccaaggccatcatcccggtggatgtgggggggatcctgtgtgattacacccgtattttttccatcgtggaagatcgccggggagacttttcaccggcatctcctctgcaggcgcagctggggcggatcgcggtgatcgcggatggcgcgcacagcttcggtgcggtccgcggcggcatccgcagcggtgcatgggcggatttcaccaccttttctttccatgcggtgaagaatctcaccaccgcagagggcggcgcagtgacctggcgcagggatctgggtctggatgatgcggcgctctatcgtcgctatatgctgctgagccttcacggccaggacaaggatgccctggctaagaccaaggccggcgcgtgggaatatgacattgtggcgcctctttacaagtgcaacatgacggacatcatggccgccattggcctggcccagctgcaccggtatgaggaactgctggccaagcggtatgccctggtggagcagtatcatgagctgctggcgagtacggccattcgccccgcccggcacctgacggaggatggccgctccagctgccacctgtatctgacggagctggaggggaagaccctttcccagcgcaatgccgtcattgatgctctggcccagcagggaatcgcctctaatgtccactataaaccactgcctctgctgacggcataccgggatctgggattccggatggaggattatcccaacgcctatggcttgtatgagcgggagctgacgctgccgctgtattccacactgacccaggcccaggcagagcggatctgcggggcactgcgggagatcctgtaggaggaatcatggcaaatacccaaacgttccagcgccttgccccgcccggacggggtgcaatggccgccaagcggctctttgatatcgtctgtgcggcctgcgggctggtggtcctcagtccgttgttcctgatcacggcgttggctgtaggactgacgtctccgggcggtatcctgttctgtcaggaacggatcgggctgggaggcaaaccgtttatcatctataagttccgtaccatgcggaaggaaaattccggattgaagatcacggcttccggggatgaccggatcacaccggtgggccgaatcctgcgcaagaccaagctggacgagttgccccagctgttcaacgtgctgcgggggatatgagttttgtaggcccccggccggaggtacaggagtataccgatttgtacacagaggagcagaggcaggtgtttctggtccgtccggggatcacgggggtggcatccatccgctatcgtaatgaaaacgacctgcttgccgccagcgacgatcccaaccgtacgtatattcaggagatcctgccggaaaagctgcgtctggatctctcgtacatccctcgggccggtgttgttcaggatatcgccctgatttttgaaacattggcggttgtgatccggggataagcaaaagaaaggacaatcgttgctccatggatatttggctcatcaaccactacgcggtgcctccgaaatattatcccctggcccggcagacctgctttgccaggtatctgatggccatgggccacacggtgacgatcttcgccgccagtaccgttcacaactccaacatgaatctcattaccgacggagctccctggcgggatgaggtagtggacggcgtgcactatgtctacatccggtgcatggattaccagggcaacgggctcaagcggatttacaacatctgcgagttcgcctggaagctgcccggtgtgtgccggaagttccccagacccgatgccattgtggccacctctatgccccccacgtcctgtgccatggggattcatctggcccggaaatacggctgccggggcgtggcggagatcgcagatctctggccggagtccattgtggcctatgggatcgccggaccccggaatcccgcggtgctggcccttcggcggctggagaagtggatctatgaaaaggcggatgacgtggtgttcacctgcgagggcggatatgactatatcgtcgagcagggctgggaggggaggatcccccgtgccaagatccactatatcaataacggcgtggatctggcagtctttgatgagaaccgggcgcgctatacggtgcaggacccggacctggaggatccctccgtgttcaaggtcgtctacaccggctccatccggaaggtaaatcatctgggtctgctgctggacgccgccaaagaggttacagaccccagggtaaaatttttgatctggggagacggagatcagcgggcagcgctggagcagcgggtccgggaggaagagatctcaaatgtggtgttcaagggaaaggtggagaagaagtatatccccagcatcgtcagccgggccgatatcaacttgatccatggcggagatcagggaaaggaattgttccggtttggtattagccccaacaagatgttcgactgctttgcggccgggcggcccatcctgatggatctccctgcaaaatataatccagtggagcaatttcaagccgggatttgtctttcgagtgtatcggagattcctgccgccatccggcagattcaggtgctttcgccccaggcctatgagagcctttgcggcaatgccaggaaagctgccgcacggtttgatttccgagttttaacacaggaactgatggagattttggaaaaaaggggatgagccgtgtggaatttacctattcggcatacaaaaacctgatacacctgcttcagacgggcggatatcgggtctgttcctatcacaactggcaggatacagctcgctgtgtgatcctgcggcatgatattgacagcagcttgggccaagcgatggcactagcccgggtggagcgggagctgggtgtgagcagtacttatttcgtgctgcttacaagcgatttctataacccggcctccaaagggagcgtggaaaagctccggtccatccaatccatggggcacgaagttgggctgcactttgacgaaaaggcctatctggaagggacaccggaggagacagtgtcccgcatcctccatgagcgtgatatcctggcttccattctggagacgccggtgactaccgtctctatgcaccggccttcccaagccacgctggagtcggaccttcagattcccggcatgatcaattcctatgggcagacgtttttccatgatttcaaatacctctcggacagccgccggagatggcgggaaccagtggaggaaatcatccgttccggaacatatgaccgcctgcacattctgacccatgccttctggtaccacaaagcagacgaatccatcacagaaaccgtgagtgcgtttatccgttccgcaaatgcggaacgctatggacagatgcaggaaaatatcacagacttggcgagcattgtgatgagggatcggtgtttatgaaaattaaggaaattctggattttctgcagacggcccggatcccgttttcttttacaggtgacccggagagggaagtggaccgattttcttctctctcccactaccgggaggggtccttcacctggatcaaaaagcaggagaacatcccgctgggaatggatctgacgggtctggctctggtattcgttgcggaggatgtcgatggcggtaacgctcccaatgtgatccggacaccggaaagcaagcacgcatttttttcttcgattgagcatttttatgcccaaccagaggagcggcccgccgtggggcagtttacctatatcggtccgcgggtcaagctgggaagaaacgtccggatcggccacaactgcacgctggatggggacatcaccatcggggatgatacggtcatctggaatagtgtggtgctgttgaaccgggtgacggtgggaagccggtgtgatattcactccggtgctgtgattggtcacgatggatatgcctataccgaggatgccgggcatcacaaggtcatggtgaagcattttggcggcgtcagtatcggcaacgatgttctgatcggtgaaaacgtctgtatcagccgtggaaccattgatgacaccgttctggaggacggagtcaagatcgatgcgctggggcatatcgcgcataattgctggtttggaagaaatgcggcaatgccagttccgtgcagtgtcagcggcagcgtgcatgtgggagagaatgcctatctcgccggcgatattatccgcaatcagtgcaccatcggagagaatgcgtttgtaggcttgggtgccgttgttgtgaaagatgttgcccccggtcagaccgtggtgggaaaccctgcaaagccctttatcaaaagaaagcgtgaagaatatgcaatttattgatctaaaagcacagtatcgtgcactaaaagatgagattgatgccaatatccggggcgtgctggactctgcccagtttatcggcggcccttatgtgaaggagctggaggcgcagctggcggccttcaccgaccggaagcactgcatcacctgcgccaacggtacggatgccctacagatcgcctatatggtggcaggtgtgggtgccggggacgcggtgttttgcccggacatgaccttcatctcctccacggagccggccaaaatgtttggggccactgctgtattctgtgacatcacgccggacacctactgcctgagcccggcgggcctggagcggcagatccaggccgtgctgacggagggaaagctgacccccaaggctgcggtggcagtggatattttgggaaatccctgtgactatgatgccatcggggccatctgcgagaaatacggtctgttcctcatcgaggacgcggcccagagtttcggcgcctcctaccatgggaaaaaggcctgcgccttcggccatatcgccaccacgtccttcttcccggcaaagcctttgggctgctatggtgacggcggcgctatctttacggatgacgacgcggtggatcagctgtgccggtctttgtgcgtccacggcaagggccccggcggcaagtacgacaatgtgcgggtaggcatgaactcccggctggatgctatgcaggccgccgtgctgctgcccaaactcagggccctgggcacctatgagatggacgcccgacagatggtggcccaccggtacaacgaggcgtttgccggccggtttgtgacgccctttgtggcggagggctgcgtcagcgcctgggcccagtatgccctgctggcgaaggacaccgcccagcgagacgccatcgtggcctacctgaaggaggccgggatccccaatatgatctactatcccacgccccagcacgcgctgccggtgttccgggacgagcctcattacggagagaccttccacaacgcggacgactactgtgcccggaccttctccctgcccatgcatccctatctggaagaggcggagcagcgcaaggttatcgacgcggttttggagggtctgtgatgaaattatctgaagctgtccggggcgtttccggtacgctggctgcagatggggagttcagctgcatcgcatttgccacggaacaggagcagtcccagtttctgacgtttctggaaaaggaaaaattcctcccggctctggataattccaagatttcctgtgtgctgactacctccgcattggcggaaaagatcccgccccatatcaaaggtgtgttcctctgtgaccggcccaaggctgcactctttgagattcacaaccgcttggctcgccatccggattatgtgggcgcttctgcggctactgtggtgggggaggggtgctccatcagtcccctggcagccattgaccgtgaaaacgtcgtcatcggagaccgcgtgacaattgaaccctttgtggtcatcaagggacgcgtgatcatcggaaatgatgtgaccatccgcagcggtgcggtgatcggttgcaagggattctctttttcaaaggatacacagggtcaaaatgtctctgtggaggatactgcccggatcatcatcgaagaccatgtggaaatttttgaacaggtagccatcagtaccgggatttttccctgggaagagacccggattggagaaaatacaaaagtggatgcccagtgtttcattgcgcacggctcccatatcggtcggaattgcctgctggcgaatggcagccgctgctgcgggaacagccgggtgggagatcacgtctgggtcggcgtcggggcgattgtgtccaaccgcgtgcgcgtgggcgacggcgcccgggtatccctcgggtctgtcgtgacgaaagaagttcccgccgggcagacagtctccggcaactttgcaattgatcatcagaaatttttatccaacttgaaaaagtctttggaggaataattgatatgtccatgaaagaagaactgatcgaaaagatccaaaacaagaccctgtgtatgggtgtctgcggtctgggatacgtgggactgcccctggcggtggataaggcgaaacacgggttccgcaccatcggctttgatgtccaacaggaaaaggtggacatggtgaacgccgggaaaaactacatcggcgacgtggtggacgcggatctggaaaagctggtgaatgccgggatgctcagcgccaccacggatttctcccgggtgtgtgatgtggatttcatcgccatctgcgtgcccacgccgctggacaagcaccagcagccggacatcagctacgtccgggattccaccatcgccatctccaagcacctcagacggggatccatggtagtgctggagtccaccacttatcccggcaccacggaggagctgattcgccccatcctggaggagggcagcggcctcaagtgcggggaggacttttacctgggtttctccccggagcgggtggatccgggcaacctcatctataagaccagcaacacccccaaggttgtgggtgccatcggtgctgacgccacggaggtgatctccatggtgtaccgctccattctggatggggacgtgaccaccgtatcctctcccgccgtggcagagatggagaagatcctggagaacacctatcggaacgtaaacatcggtctgatcaatgagctggccattttgtgcaataaaatgggcattgacatctgggaagtggtggacgccgccaaaaccaagccttacggcttccaggcattctatcccggtcccggcctgggcggccactgcatccccctggatccctattacctcagctggaaggcccgggagtacggcttccacacctccatgatcgaagcgtccatgatggtcaacgaccggatgcctgagtacacggtggagcgggccggaaagatcctcaaccgctataagaaggctctgaacggctccaaggtcctggtgctgggcgtggcctacaagcaggatatcgacgactaccgggagagccccgccatccgggtcatcgaggagttccataaaacgggggccatgacggatttctatgatccctttatccccaagtaccgtcatgaaggccagtggtatcagggcctggaggcgctgacgccggagaccgtcaaagcctatgatctggtcatcatcaccacggcccacaccaaggtggactaccagatggtggccgagtgcggcgtgccggtctttgactgcaagaatgtgaccaagcacattcaaaaccgggagaacatcgaggttctgtaaagccggcagcttctcttttgggaacgcgtccgtatgaaggagtttcaggaatgatcaaagtatgccatatgaccagtgcccatcagccgggagacacgcgtatttttcaaaaggagtgcgtctctctggcaaaggccggttaccaggtttttctggtgcagcggggagagagcggggagaactccggtgtccggatcatcgatgtgggacagccctccggcgggcggcttacccggatgacctcctttgcccgcaaagtgtatgaggcggcactggccgtagacgcagacctttatcaccttcatgatccggagctgcttccctacggaatcaagctcaagcgccgggggaaaaaggtgattttcgacagtcacgagctctatgccgtgcagctgcggcaaaaaccctatctgccgggctggtgcacgcggatcattgcgtttggatatgcgcggtatgagcgttacgtcctccggcgcctggacggggccatctttccctgcaccgtgaacggagaggacccctttgcgggaaggtgtccccacacagcgctggtagacaacagcgtcaagctggaggatttttatgagcggtatgatccggaagccgtacggaaccaggatcagatctgcctgacaggttctttgacggaggcccggggcatcaccagtgcgatccgggctgcggcgtcggcaaagtgtacacttgcgctggctggcccgatctctccggcggactatgaggcccagctccggaagatgccggaattttccagcgtagattaccggggcgtcctggccaaggaccaggtggcagcgcttctgcagaccagccgggtgggcctttctccgcttttgaaccagggccagtattggaaggctgagaatctggccaccaagatctgtgagtatctggccatggggctgccggtggtgatgaacgggtctgcctacaaccgggcattcgtagagcgctggcactgcggcatctgtgtggactcggagaacgtggaggagatcgcctccgctatccggtatctgctggatcatccggaggaggcccggcagatgggagagaatggccgtcaggccgtgcgggaagaattcaactggggcgtggaggaaaaaaagcttctggccctgtacgaggaaattttcaaggaataaaaggggaccatcaacatgaaatacgtgctcatcggctgcggccggatcgccgtcaaccacatcaaagccgtgctgaacaaccacctggaactggccgctgtgtgcgacgtcaagccggaggccatggagaccctcctggccaagcacggcctggagaaggacacttccatccgccgctataccgactatcgggagatgatcgaggcggagcagcccactctggcggccattgccacggagagcggaatccacgcggagatcgccctctactgcatcgcccacggcgtcaacgtcatcatcgaaaagcccatggccatgtccatggcggatgccgacgccattgtggaggctgcccaggcccaccatgtcaaggtgtgcgcctgccaccagaaccggttcaatccggcggtccaggccacccggaaggccctggaggagggccggttcggcaagctctcccacggctccatccatgtgcgctggaaccggaacaagggctattacgaccaggccccctggcgcggcacttgggcccaggacggaggctgcatgatgaaccagtgcatccatggcgtggatcttctgcgctggatgatgggggatgatgtggtggaggtctatgcccagacggctcagcagttccatcactatctggaatgtgaggacgtgggcatggcggtggtgaaattcgccaacggcgccatcggcaccatcgagggcaccaccaacgtctaccccaaaaacctggaagagacgctgtatctcttcggtgagacgggaacggtgaagatcggcggtacctccaccaataacatcgacgtctggcagtttgccgaccaacgggaggaggacgcagccctgcaggggcttcaggaggccaccagcaatgtctacggcaacggccataccgccgtttacgcggatatgatggacgccatcgtccatgaccgggccccgtatatcgacgctcaggccggccgccgggcgctggagatgatccttgccatgtatcagtccgcggccaccggaatgccggtgaaactgccgctcaaggacgtggcctccctggacttcacaggccggtttgacaaaaaagaggagacaaacgggtaaatgaagctgccatctgtcacagaaaaactgcgtgggagccgggcggcccaatccctggagaagctctcccgcgtaagccggaggcatcagtttttgttccagtgcggactgatcctcctctaccggctggtgctggacttcatgtaccttacgcagctctctcccatctacgcctacagcggctttaccacggatctggtgtggatcaaatacgccctttcctggctgctggtattggtgtgtctgcccctggtggtggggctccagggacaggaggaacgtccctcctccatcctggtgacgctgatgaactatgtttactttctcccgatgacgtcctatctgggatgcaagggaagtgatctgggcttcttctgcgcagtggcggtgtactggctggtgctgctggcggtgcagctgcgtatgcccaccatcttggtgcccaaactgccccaccggcatacctccttgttattttttctcgtgagtgtgggggcgtgcctgttcgttatggggatctcggggatctataccggattccggctgaagttgaacctttcagatgtctatgggatccgggcagaggcagcagcctacgatattcccggtctttttgcctacgttctctcctggatgacggtcattttgtccgtgctgatcctgtactggctgcaaaagcgccggtacgtggcggtaggcgtgctggtggtagtctatctgttctattactccatcagcgcacagaagtccgtgtttttgtttctctttttactgctgttctgctacctgctgtaccggaaatggatgtaccgctggtgcgccgggctgttgtcactgggagtcatgggctgctgggtgctggaggccggggcccagtttctcacccccatgtccctgtttgtgcgcaggctcatgtacgtgcctgtccagctcagcgaggtgtacgcccaatttttccgggagcacccgctgaatctgttccgggacgggattttggggaagctgtcctatgacccggtctattccattaagatccccaaggtgatcggagaatatatggggaccggatccagcgccaacaacggtctggtgggtgatatgtatgccaatctgccggtcgtgctgggggttttcctgatgccgctgatcctggtgatcctgttccggctgctggatgcggcagccagagacatcccccaaaagatctatatcgggctgtgtgtgttttttgctatgagtttctgcaacggttcctggagtaccgtcctgctgtccggaggattcctgatggcctgtatcttcctgtatctatttcctgtacaaaaagaggagcacgtaaagaatgaacaatcgtgaactgcgcgttcaggaccttatttccgggttccggcgcgattggaaactatttttggtcattgtggccgggttcctcctgctgggtcttgctgctggattcttcttttccggccgggcctcggcggaagggtccggcagcgcccaggcatgggagccggtggactttgcggaggtccccatgggtatcacctattatgtggactgttacgactacatcaaggagcagcgcaaggtcctctgttcgtacattgacggtgtgcggaacgattcctctattacggaatcgcagcaagagcagctcctagagatgaaagaagaaatcctgatctttgatgaggacgagcttgttcctatctactgggatctgaacgccccggatgcgttttacctgcccgatgagctacgtcagagcactctggctcagtatcggcgggagcgggagacgctgctgcaaaatatcagcaaatccgagtatgccagatctctgctggataccgtgggcggcctgagtaccagcgacgccgccgtcaatgagatctacgcctccattctttcccaggcagcggaataccgccagctgcagctggatctggaacagctggatacccggctgaatctgctggaaaacgagtatcccgcgctgcgccaggccagtgaagaaatggcgcagcgcctcgatgacgccgcccgggcgctggatgcgcgggcggaagaggcagtggccctgctggaggagattgcgcaggaaaaccatctgaatatcaccttctcggcggagcaggaggacgtgacggtccagatcggccacactacccggcccgccacccgacaggaggcatttacggcctttgtgatcttctttggacttgtgggtatctgtgctggcggcttttttgtcctatgccgggagacttcttcctacaaaaaggagtctctgcagcagtgatttgaagatttgaaaggatactctgggatgcagtctcgtttgctgaaaaatattctctctgtcagtggcgtgctgattttggtcaaggcgctgggttttttcaagcagatggtaatcgccggcatttttggcgccaatgccgagactgacctgatcaatctgtcctatggatttatcggcgacatccaatatctgctggttcaagtgatgcttaccgcagtggtatctgtttatattcatgtgaaggaagagacccagaatgaagccgggcagtttgccagcgacaccctttgcgcaggcaccatcgttgtagcggcgatttcagcgaccatttttatgctttccccctggatctcaaaattgctggccccaagctattcccaggaattgagtagccagctcgggggctatattcgcctattttccccgatcctcattccattggtttggatggcggtttttcatgcacttctcaactccaacaaacgctttatcccaggtcaactggagggattgtaccaaagcgtgatcctggttatcgtgattattttgggagcgccctatctgggcgtggactccctagtcattggatattggttgtatgcaaccttcagcgccgggtttctgggttatcaggcgcggacttatttgaggaagagcagtagaaatccgttccgtaatccgcaggtccgttcgcttctcgcaatggttggaccactttctatcggctatggtgcagtttatatcaaccaaatggtagacaaaatcctggtatccggactggcggatgggacggtcactgccatgagctatgccgctacactttccaatctggtagggacactgatttgctccctctgctccgtgctttatgcccatgtaacagaatatatttcgcaggaaaaggaacaggctgtggcccaactgacagaacgggcgattttggttctggtgattctgctgctgcctgtcactgtgatcgcagtaagccaggcggaagacatagtcctgctcatatatggccgcggcgcatttgacgcggaagcggcggctatgacagcccaggcattgatgggctacagcctgagttttatccctttggcgttacgtgaggtatatagccgggtccaatacggatatcaggactctaagcaccccgcggtaaacagtgtcatcggcatcgcctgcaatgttacattgagcattttgctttgtcgaaagttcggtgtatttggagtgacccttgccagcagcgtagccaccctagtaatcggcatgctgaatgtgcagtctgctcgccggaccgcatcattcctgtcgttgaaatctctttggaacttaacaccgaacatattgataggtggaatcctgtccatccttttgacgtggggctgcaagcaatggcttgcagaactgccgctgctgattcggctgtgcttgaccactttctttgtgttctctggatatagtgttttggtcatccctgcggtatggaaaaccgggcttatcaagccatgtcatttttcgcgcaaacaaagatgagcaggaaaaatatcgctactgaagaggagccttctattagcggctggtaatttttatagtccgaggaaggacgctctgcagagatcagaaagaaagcggcgcgtcccatatgcagagtagcctcttttttgagtggtctgctagcgcgctcacgctatgattctttgcctgtccccactcagcttttttggagccgtgcaggcattctgcctcgaatgctggcctcaatttggggctatcttcgcagaaagcagttgtatctctgtgtgcattgccacgggcaacgaatatcaaatgaagggaattattttatgtgtggcatcagtggttatctggatctagaccgtggagtggatattggaatcttgcggcgtatgacggatgtcatccgtcaccgggggccggatgacgagggatatgctttgattggccccggtgggacatcttttttcggggggaacgatacagtaaaagggctggaggtccctccgctggaaactgccgtggggaccgcttcctttttgggatttggtcatcgccgcctgagcatcttggatctgagcgttggtggtcatcagccgatgtatttgccggaacgggatatcaccctcatctacaatggggagttatataactacatggaacttcgcgcccaactggaagctctggggtataccttccacaccaccagcgacacggaagttttactgtatgcctactgcgaatggggtgaagattgtctcacacagttcaacggcatgtgggggtttgctttgtgggatggacaggaaaataagctgttttgcgccagagatcggctgggagccaaaccgttccattactggcgccagggaaaccgtatcatgtttggatcagaactgaagcagctttgtcaggatggtgccgtacaacggcggtttgacacctcttatttggcagctaacctgatatatcatatcagtgattataacgatcagactctgattgaaggcatgaagaccctccgacctggccataagcttgttgtgcagctgggggccggtcataacaccatcgactcctttaccatttcttcctattggacgttgcatgttcattatgataacagtaaaaccgaggcggagtgggtgcggttggtgacagaggagttttccaggtcttgccgctggcgtatgcgtagcgacgcccccctgggggcgcttttgtccggagggctggattcctcctgcatggttactgagatgtgttcgcagatggaagacccctcacggttgcaaacgtttactaccagttatcctggtaacaactcctgtgacgagtggttctttgccgatcttatcaaccgttcctgcggctgtacaggtaaccagatcctaccggatgccgaggacattgaaaagcgttttgagaatttggtgtggcatgtagaagggagctgtggactctctcttttaggcagcaaatttttgttggatgaaatcaatcgccgcggctataaggtgattctcaatggccagtgtggtgatgaattgatgcttggctacgagcgttattatgcattctttttcgcatccctgatcaagagaaagcagtggaagactctggtgtcagaatttcgtcaggccagtcgccattccaaattatctgtgagagatctggccgcttatgcgctctactttaatcagccagtggtgcgggactcacggcagcttcatcgtgccggccggttcatcaaccccgacctgttagaccagcgcaatcgtgtggagttgcgggagttgctgtatccaaaaatactggaaaatctccaatacacggagttgacggcaacccagttgacacatattgtacgctatgacgaccggttgtatatgtcggcttcaattgaaagccggattccttttatggactatcagttcgtggaactgtgctgtcggattccacctgagtacaagatcaaaaatggttacaccaagtatctgatgcggcaggcatttgacagaagaatgcctcgggaagttacctggcgcacgaataaaatgggctttggagcgcctgtgacacagtggggcaggaggttttcgcgggattatctgttggcgtacattgaggattgccgtacagagaagtacttcaaaaaagaggcgcttgcacagatggtaacccgcaatcaagcggaaccgtctatctatgaatttctcgcggttgaactttttgcacggcagtttgatgtgtcataagtatgggacattacaggggaaaactgctttgatatagtttttcgggtggtggaggctatttcgctttttggtgcgaatattgatatatattcgcatccggacaaacaagaggggagatccgcatgacctgtgttaaaagtaaaaataagttactgactacagaagtgtagaaacagaattacaggatgtccttagcggtaaaaaagcaaaaaatgagtggcgcctaggaacttttgttaattgaaaatggatatgaaaagttccacgctggggcgctaaacaaactcacgtcctcctgtgcgcactccgatagcaggagttgcttacacttgattttttgcgccattttatccatttttctatgacaaacacaaaattaaaaaaatctagccgaaaaatggatttgaaaaaatagatggcagaaagatatatttgccactttaaatttcggccataacgctgtataatttgttatatgatcgtaacctaaattaagcggggaacgacacataatgcaattaggagcgtatgggcaagatgaatcatctgcgaaaacagattctctttttgtgtgacagtctgattttaattgttttttcgacttttttctcgtggttttctctgcgatataatctgacggatgcagttggacaatccgttcagctgattcaaaattttgcgttgctttatgcctgcacagtgcttttccaacttttattccgcacgtatgacagcctttggcggtacgctgagagtaaggaatacctgtcgctgctcatggctgcattttgcggatttttcctctacgaggtcttgagccgcatttttctacagagcataatttcctttatgctcctgacttgtgtggccagcctctgggtcttgggaatgctgttgctgcgctttgcctaccgtgtttaccgcagtcgggtactatttagtaagggcagccatcaaatccctgtggccattgtcggtgcaggagcagctggcgttcagctgctggatgagctccagagcaatccagacagccgatacagtgtgcaatgcttttttgatgacgaccttggcaagctgggaaaacgaatccatggcgtggaagtgaaggggacgatcagccaagtgcaggagcgcctgcgcgcgatggatattcaggagatcattgtggcgattccatctgcgggggaaaaccgccgccacgagattttacagaaactgtccggcctcgagcggatcaaaatttctgttttgcccagtacactggacatgatccgccaaaagccgatgcgctctcaactgcgcgaggtccgcattgaggacttattgggccgtgagccggtgtacttggacccagcgcctgtggatgcatatctctctggaaaaaccgtattggtcactggaggcggcggctctatcggttcagagctgtgccgacagattgtcaagcacgatcccaaagagctggtgatcgtggatatctatgagaataacgcctatgatattcagcaggaactgctgtaccagtatggtgggcggctcaatctgaaagtggagatcgcttctatacgggacaggaggcggatgcggcagatcttcgctacataccggccggatgtggtttttcatgccgctgcgcacaaacacgtgccgcttatggaaaacagccctcaggaggcgatccgcaacaatgtatttggcacactaaacctcgtgcgggccgcggatgagttctgtgttcagaagttcctgctgatctccacagacaaagcggtcaatcccacctctgtaatgggcgccagcaaacggctttgcgagatgattcttcagtccatgaaaggacacagcggcacagatttcgtggcggttcgattcggaaatgtcctgggctccaacggctccgtagtaccgctgttccagcggcagatcgccgcggggggaccgatcacggtaacagacaagcgcattatccgttattttatgacaattccggaagctgcgcagttggtgctgcagaccggtgccatggcccggaagaacgagctgtttgttctgaatatgggacaacctgtaaaaatcctggatttggcggaaaatatgatcagactctccgggtatgtgccgtatcgggacattgacattgtggagacggggctgcggcccggcgaaaagctgtacgaggagctgttgattgccagccgggacattgagcagacggagaacagccagatttttatcgagcggcagccggcgattactcccggtgagctgagagagaagctggagattctccaggaggccctggagaaggatgattcctcctgcattcgggaggcgctgcacagggttgtgccaactttccatgagccggaagaggtgaactgcgggcaaggcgccgaggtccgcattccgcaacaggctgctttcagataaagatcagaattttcaaaaaaccgccatgcgaaatgtcagcgcatggcggttttttcaggacagatttcctacacgatataaggagagttctatgaccaatcatttttcccttgccagattcctgctctggattcctccattgctctggtatcgaatcatttggggattttccgcccagacagcgtctgcctccgggaaagtatctgatggacttctgcatcgcatcttaattgtgctgtcgcctgcgtatgcccggtccgaggccgatattcagggggcagctgttgaggtgctctcgttttttgagagaaaagccgcccacatgtttttgtatttccttttggtcatcctgttgttagcggcgcttgcgccctttgtccggaacatcctgcgccggtctgctgccgcgggagttttctgtgccgtcctggcagccctggatgagattcatcagacgtttgttccagggcgcagtggagctgcacgagatgtggcggtcgatttggcgggagccgcaatcgcgtatggtatttggtttctactgcgatgggtaggagccgcgcgaagagaccggcgccggctgtctgcaatccgaacatggatgcccgcagggattggccttctcagtgcctgtattctgccgcaccttacacaatccgccttcagccatccggtttttgagcgcctctgtcagcggttcctggaaaattgggaaacgcttgacgcagccggaaagatcgctgtattagaggggatctctcctgttatgaaggagatgttatatgcgggaacagcggggctgttggggctgatgactatcctgacgctggcaatgcggggatggccgctgctgcgctcgatcacggtatcggtgtcaactgctgcgctggcagcggtcttctttgcggggctgcatagttgctgcttgatcccgggacttttatctatagccatgagtgtccttctgggaagcatggtttgggccagctgcattttaattgtgaaaagcaaagcgctgcttctccataaagaattccagatgtaagcacgaagccccaacgggcttcgtgctctttcaaataagcttatagtgcggccagggaccgccagatcggaatccgatcatatcaaacagaatcaagagcgggccggccaacagcagccataaaagcgcatatctgagacaaatctgccccaaaaaattgccgaaaagagaagtgtaatcccaaagccccaaaccaagccagacattgaaaaccagcccggcggtcaactgggaaacaatcagcacgatccctcccaaaactgcctggagccacagcggaaatgtccagggcattcgttcgttgacagcgtccaaagggatacacaggagggagaatacggcaagatcggtccaatggcagtttccggtcaaaagaagctgtaaagcgcagaaaacgactccgccgcagaaccatcggaatatatgccaaagcagctgcatgatacgtccccctcaaaaaaattatccgtttcccatcctccctgattaggcatgcacaatgctgaacgccggaaacaacagttcccatccggtatgcggatgacggagctccttgccaaggtattcgtgaagaacctcgtgcgcgtggccacaaactcaaggccagtggccaatcggaactgcagtatggaggatttttcgggcagctccgtttgatttctccagtatgcggactggcaacgtgatgtcggaaaccttgcgggaaagcgtctttagatgagctgcatggctatattttggcagcggcaaatgacaagaggccattgttagtttatgcacattaccgcaaaatagaagtcatttccgattttagaaaaatttattactccatagagaaaacgtagattctgctgaacagagaaaggctccggacgggtggccttcattcactgttttccgtgcctgtcgtactcttggggacagcaatctttcgggggtatggcgcgaatgtgccgccgactatcgggtgacattccggttttcagagtgtcgatttcgccgatgcctttttccgggagcgtacagccagctgcaatttctccatgatgttttgggggccggatttccggcggacggagtcttttgtggacgaaacgagggagaaatcgggcacatccgctgcgggggttggagacagtacggttatatctacgaaaaagagaggagccgtttggctaaaatagaaaaaatggcggaggccctggaaaagaagttgatttttctccctaaaaatgatagtttgtaagagagcacgcagagaggcgtgtgattgctttccacatttctgtgaacgaacacagaatggagagaagtgtgcaaaacatgcggcccgctctcacgggaccgctggaaaaattctgaggcttcacaagggggaaattccaatgtttgattccaaccacgtattcctgggcattgcacctatcggctggtgcaacgacgatatgccggagctgggcggggagaacaccttccagcagaccgtcagcgagatggcactggcgggcttcaccggctgcgagatcggcaacaagtatcccaaggatcctgccgagctgaagaaggccctggacctgcgcggcatgcgcatcgccagccgctggtactcatccttcctcctgacccgcccctttgaggaggaggagaaggacttcatcgccaacctggacttcctggctgctgtgggcgccaaccgcatcaacgtcagcgagcagagctactccatccagggcaagatggacgtacccgtgctcaccggcggccacaagcatgtgatggacgacgccgagtggaagctcctgtgcgacggcctgaacaagctgggcaagatcgctgcggaccggggcttcaagctgtgcttccaccaccacatgggcaccgtggtccagaccagcgaggagacggaccgcatgatggccaacaccgatccccggtatgtgttcctgtgctatgacaccggccacttcaccttcgccggcgaggaccccctggctatgctgaagaagtacgtggaccgggtgggccacgtccacctgaaggatatgcggctgcccgtggtggaagaggcccggaagaatgactggtccttcctgcaggccgtccgcaatggcgccttcaccgtccccggtgacggcgacgtggacttcgatcctgtgttcaaggtgctggcggatgccggctaccagggctggctgctggtggaggcggaacaggatcctgccaaggccaatccgctggagtatgccatgaaggcacggaagtacatccgggagcatacgggactctaattcgaagggggactgcgtcccccctcgaccgccccctccccagtgacgtcggtcactggggacgccgcccagggcggctaagtcaatgtattttcggcaggcgcatgtcctgccgaaaatggttgaaatgcatcgcgccgctggcgcgaatggaatttgagcaacaatctttatttaggagatgactccaatggcctatatgaacaagaacgccgagctgaagaacgggtacaatgcctatattgactcctctgtggacgacatgggcacccagatggacgtgggcctgctgctgatggaggcgggggatacctacgtctatgaggatgccaaaaaagaggtggcaatcctcctgttttccggctctgtcacctatgagtgggacggcaagaaggtggaggccgaccggccggactgcttccaccacgatgcctactgcctgctggccggctgcggcacgaaggtgaccatcaccgccaaggcccacagtgagctgtatatccaggccactgtcaacgagacgccctatgaggccgtcatgtacaccccggacaaggtccaggtggagcacaagggctttggcggcgagctgatgggctgcatgtcccgggagatcaagaccttcttcgacctggacaacgcccccttctccaagatggtcctgggcgaggtgctgaatctgcccggcaagtggagctcctatccgccccaccaccatccccagccggaggtgtacttctaccgcttcgactatcccgacggcttcggcgcgggctttgccaacggcgagatcttcaagacgcagcacaatggctgcgccgtcatcaaccatggcttccactcccagaccgccgcgccgggctatgccatgtgctacgcctggggcatccggcacctggagggggatccctgggacaagacccgcatcgacgatccggagcacgcttggctgtggaaggccgatgccaacgaccacatctatcccaatcactgacaggaggtaatcaccccatgaaaaccgttcgtttgaccatggcgcaggctttggtccgtttccttgagaaccagtatatcgaagtggacggcgaacagagccgcttcgtccgcggtgtattcatcatccccggccacggcaacgtggtgggcctgggccaggccctgagccaggaggccaagcacctggagatctggcacggccagaatgagcagggcatggcccaggcagccgtggccttcgccaagcagatgaagcgcaagcagatttgcgtggccacctcctccgtgggccccggcgcggccaacatggtcaccgcctgcggcaccgccaccgccaataacatccccctgttggtgctgcccggcgacgtgtacgcctgccgccagccggaccccgtgctccagcaggtggagcagaccaacaacctctccatctccaccaacgacgccttcaaggccgtctgccgctactgggaccgcatcgtccggccggagcagctgatgagcgccatgatctccgctttccgggtgctgacggaccccgccaacaccggcgccgtctgcatcgccatgcctcaggacgtggagggcgaggcctatgactatcccgagagcttcttcaagaagcgcgtctggcgtctggagcgccgtcccgccaccgaggccgctctggccgacgcggcggaggtcatcaagaaggccaagcggcccattctggtctgcggtggcggcgtccgttactctgaggcccacgaggagttccgggccttcgcagaggccaccggcatccccttcggcgaaacccaggccggcaagagcgccatcgagtggacccaccccctgaacctgggcggcctgggcgtcaccggctgctccgccgccaacgatattgccaagaaggcggacgtggtcatcggcgtgggcacccgctacaccgacttcaccaccgcctccaagtggctgttcaaggacacctgcaagttcgtcaacatcaatgtgtccgagttccaggccctgaagatggacgccgtgcccgtggtggccgacgccaaggatgccctgccccgcctgctggcgaagctggacggctacaaggctccctacaccactgaggtgtccgccgcccgcgagaagtgggccaaggagctggagcgcctggatcatatcacctttgaggacaagaagagctggaaacccatcatcaacgacgccaacgccgactccgccaagcggttcgccaaggacctggacgcaggcctgtgccagaccaccgtgctgggcgccatcaacgccatgatgagcgagggcgacgtggctatcggcgccgccggctccctgcccggcgacatgcagcggatgtggcggcccaccggcatcgactgctataacatggagtacggctactccaccatgggctatgagatcgccggtgccctgggcgtgaagctggccattggcgacaagcgggaagtctacgccatgtgcggtgacggcagcttcaacatgctccacggcgagctggtcaccgctgttatggagcgcaagaagatcaacatctgcctgttcgataacgcctccttcggctgcatcaacaacctgcaggtgggccacggcaacgtgacgctctgcacggagctgcggtaccgcagcaaggacggcctgttcggtgacttcctgaacatcgattacgccaaggtagcggagggctacggctgcaagagctactccatccgcaccatggaggagctggcggcggccttcgaggacgccaagaaggtgaaggaccgcccggtgctgttcgacatcaaggtgctgcccaagaccatgaccgacggctacggctcctggtggcgcgtgggcgacacggaggtgtccgagcggccggagaacctggcggcctatcaggatcacctggaccacgtgagggacgcccggaagtattgatcctctcaagggggagcttgctccccctcgacctccctaccaccagtgacatcggtcactggtgaacggcgccccaggcgcctggggcggggaattttcggcaggcgcatgtcctgccgaaaatgattgaaagatcttctttcgccgctggcgaaagaactgggaaaacacttggtttccccaagtccctttcctgcgggtatcgaaagaggaggagattcgtttgaattgtcctttttgcggcgcggaaatggggagcggcgctttgcaaagcaactatggaatctattggctgccaaagcctcggaaagccggaccaccggacttgtctaaggatgcagagcatttgagcaggcaggataccccgcttattacgccaccttatatcccagcctcccgctgtaccaagtgccggaagattattcttgattactgagctgccgccccggtcggcacgtctatgaccgtccgggccacggtgcggcgggcggttgataaccgcccctacaggaagatctccgggctttcccgaactgccaggagagcggcagcgaaaagcggcgcaggatgtatccctgacttccccgggctggtggtttccccaagggtagcgcgtttccgtccctgactgccgcaagggaccgtcaaccatcccccgccggcggcaggaggtctgcgcctgcgcagaccgacccgccgaacatgttttcttttccaccgggcgcggcgcattttctttttgatgtctcaaaaagaaaatggggggcgcatctgccagacatcatcatagctgcctttccccgctgaaacgggcggccttacaactgcatatcctcattttcaaataaaggaaggtacacaatcatggataaggttctgaaaatcggcatcatcggctgcggcgccatcggcaaggatcactgccgccgcattatcgagacggtccccggcgccacggtcgtggccgtcagcgactatgtggctgctgccgccgacgagactgccgccaagtacggcatcaagtcctatggcaacgactgcgacggcatgatcaaggaccctgaggtggaggccgtggtcatcacctccatcgatcctacccatcacgactacgtcatgaagactctggcagaggagaagtggtgcttctgtgagaagcccctgagccagaacgccaaggactgcgaggagatcatccgccgggagcaggagatcggcaagcggctggtgcaggtgggcttcatgcgccactatgatcggggctacgctgagatgaagcggatcatcgcctccggcgagctgggcaagcccctcatcatcaaggcctgccaccgcaacgtctcccagggcccgggcttcaagaccgagaacggtgtcaccaacgtcgccattcacgagctggacatctgccgctggctgctggatgacgagtatgaggacgtgcagtgcgtgaaggtccgccagtcctccaactccgacaagggctatgataacccccaggtgatgctgatgcgcaccaagaagggctgcttcatcgatgtggaggtccaggtggccgacggctacggctatgacatccagtgcgaggtggtctgcgagaacggcaccgtcaagctgcccgatccctacgccgtggtgtgccgctcccgtcccgccggctgggacagcgtgaagcccgccgagtccatgcccatcatgaccgactggaaggagcgcttcatcgaggcttatgacattgagttctgcaagtgggtggagtccgtccatgccggcaagctcaccggcccctcctcctgggacggctacgtggcctgcgtggctggcgacgctctgaacgcctcccgcggaacctctcagttcctgaaggtggagaccatggaaaagccggaaatgtacaagtaatctgcaaaatcaagcgcaaaaaggccgccctcccgggcggcctttttgcggggatcccctgggaagcgtgaagggtcgagagttgagaacgaagagcgctgctgtttggatagaagctgcctcttcgtatctctgatttccacccctcacgttttgctctgttggaggacttgtttctttttgtttccaatcgttcacaaaatctcccttgttttcgcggtcggaaggctgtaccataaaaacagaacaaagaagatcagacggccgtccgcggccggaaaggaacgatatgaacatacgaaagaaaatcctgactcgctgcggcgccctgctgacggcggttctggtgctggccccaaccgccctggcggcggaggctgagataccgtacatcccccagactgtcccggcggcccagcttgctccggcagaccagagggggcaggaggactggcagctgctgctggtgaacccttggcacacggtgccggagggatatgagatcaagctggccacgttatccaatggactccaggtggacgaacggatctatgatgatctggatgacatgctctccgactgccgggaggcgggcctgaaccccatcgtctgctccgcttaccggacagaggccacccagacccggctgtaccggaacaaggtggcgcgggtccgggcctccggtgtgccggaggaccgggtggaggcggaggccgcccggtgggtggccaagcccggcaccagcgagcaccagaccggcctggctctggacattgtagccgccggctatcagatcctggacgaggaacaggaggacacggcggagcagaagtggctgatggagaacagctggaagtacggcttcatcctccgttatccttcggagaagagcgacatcacaggcatcgggtacgagccctggcactaccgttacgtgggcaaggcggcggcagcggacatctaccgcaccggcgtctgcctggaggagtatctgagccaggaggggccggaggcggagctggcgcctgcgcagacaatccggcaggcggccccggcatccggctctatggagaccgcgccgcagggggcggcggccatctgaaactgcatccacatacacggcggggaaacccgccgtgtatattttccctgaattcctacttgacaaataggattttttgtgagataactataccatagtaattaactgggaaaaggagtgaaccagatgaagatttacgcggacaacgcggccaccactcgggtgagcgacacggcgctggcggccatgacgccctgctttcaggagatctacggcaatccttccagccttcatacgccgggacagcgggcggcggagaagctggcggccgcccgggcgatctttgcacggaacctgcatgcggatccccgggagatcaccttcacctccggcggcagcgaggcggacaaccaggccctccgtaccgcggcggccttgggggagaagcggggcaaacgtcatatcgtctcaacgaaattcgagcaccatgccgtgctccataccctccaggccctggagcgggagggctttgaagtaaccctgctggacattccgccggacggcgtggtgacggcggagcaggtccgggatgccatccggccggacacttgtctggtgagcgtcatgtttgccaacaacgagatcggcaccatccagcccattgctgagatcggcgccgtctgccgccaggcgggggtcctgtttcacacggacgcggtccaggcggcaggccacctgcccatcgatgtggaggcgatgcaggtggacctgctgtccctctccgcccataagttccatgggcccaagggcgtgggagtgctgtacgcccggcgcagtattcctctggctacgctgatccatggcggtgcccaggagcgggggaagcggggcggcacggaggacatccccggcatctgcggcgctgcggccgcctttgacgaggcctgtgccaccatagaacagaacgccgcctacctcacgcctctgcgggacaggctgatcgccggccttaccgccatcccccacaccgcgctgaacggcgattcggcccggcggctgccggggaatgtgaacgtgtgcttcgaggggatcgaaggggagtccctgctgttgctgctggatgaaaagggcatcgccgcctcctccggcagcgcctgtacctccggctccctggaccccagccatgtgctgctggccctggggcggccccacgaggtggctcacggctccctccggctgagcctgagccatgagaaccggccggaggagatcgactatatcctggaggtcctgccggggatcgtgtcctatctgcggggcatgtcccctgtgtgggacgagctggagaccggcctgcggccgcatctgatctgaaaggagacaatgactatggccttatatagtgataaagtgatggaccacttccagcatccccggaacgtggggaagctgcccgacgccgacggcgtgggcgaggtgggcaacgccaagtgcggggatatcatgcggatgtatatccaggtggacccggagacccaagtgattaccgatgtaaagttcaacaccttcggctgcggcagtgccatcgccaccagctctatggctacggagatgatcaagggcaagcctgtttccgaggccctgcagctcaccaaccgggcagtggtggaggctctggacggccttccggcccataagctccactgctctgtccttgcggaagaggcggtgcgggctgctatccgggattactacgaccggaacagcatcccctacggagaggaactgcgggcttgcgaaggacattgcgatacctgcggacattaagaaaacgcctcggagcaatgctccggggcgttgtttctcccaatcaaaaatcatcgtccccgtctagctcgtcctcgtacgggtagcagtccgcgaacatcttctcaaaccggcgctgattcttccggtcgttgggcgtcatccgattcagattcttcagaaaggacaaaatcataccgaagagatatccaaaggtgccgggggcggcggtgagccagatcatcagcgcggaaatcacggccacgcccagaaagccgatcaccgtgcgccaggcgatccggcggagtgccagcgccagatcaaaggccgggacctggtgcttccggcgtctggccagggagatggaggagcaaagcgccaccagggcctgaacgccgaagatgctcatgataagaaaaccggcgacagccgcgcacagaaaatggagggcgattgaggcgatatccatgcagggttctcctcccatgtccaactgagtacgatcattatacaggaaaaccgccggtttgacaaggggtgttcacgcgagccaccatgtccggccgtccaactgtccgtcctggatggtcactacgccataggaggggcgggtgggggcaccgatgctgccgggattcaggaacagtgtccggccccgccggtccaccagaggtctgtgggtgtggccgaagaggaagaggtccagctgttgttcctccgcggcaaaccccgcggtcaccagggactgcttcacgccgtaggtgtggccgtggcacaggagaatacgcttgccccgcagctccagcagccgttccgccggctctgtgggacggaagtcacagttgcccggaacctgttccagggggatggagggaaacctgtcgtggagccgttccccgtcccgccagcagtcccccagatgcagaatcaggtccggggaggtctgctccacggcctgctccatgggactgacggcgccatgggaatccgagagtaccagaattttcataggcatttcctttccggagaggtcttttggttcagtatagaggacggcggcagattttgcaaattttttgcgtggatccccggcgcgctttcccggatgcggaaaaattgaaaaaggggcttgacagagcagagcggctatggtatattctacctgtggttagttaaaactaactaacggcgcgggccgggagcggcccatactttcaacgccggggtttgctaaaactaacttcggcggcaggaacggagggcagtcatggaacggagctttgaagcggtgctggtggaacaatgtgccaccacgctggcgggtgtgaagccggccagcctgttccggtatcagggcgctgacaagcggcagccccgggaggccgcggcccgctgggccaaagagctggccccttacggcatcaccatccgggtcctgaaatactgtccgcagacgggtgcttgtctgatctacctgtaccgggccggatggcttcggtcgatcctctcggagccatccacccgcgcctttctggcggggcaggggtatggggcggatcagagctgtcaggagctgctgaggcagctttccaggcggctgtgcctggagcgggaattcccccatgagatcggcgtctttctgggctaccccctggaggatgtggtgggcttcatccggaaccggggcaggaactacacctgctgcggatactggaaggcctacggcgacccggaggcggcacaaaagcgtttcgatcaataccgccgctgcactgccgcctgctgtgagcagttccggaagggcacggccatcacgcagctgatcgcagcgtgagctccaacacaagctggaaaggaagcaatgctatgaacaaattagccatcgtatactggagcggtaccggcaacacggagaccatggccaactgcatcgcagacggcgccagggagtccggtgcggaggtcgccatgctgccccctggggagttctctgccgcccggttttctgaatttggtgtcgtggccttcggctgccccgccatgggcgccgagcagctggaggaggacgaagtggaacccatgttcgccggattggaggactctctgggcggaaagaagatcgccctgttcggctcctacggctggggcgacggccaatggatgcgggagtggtgcagccgctgcgaggcggcgggcgccaacctgtatgacgaagcgggcctgatcgccaatgattctcccaatgaagaggcccgagaggcctgccgggagttgggccgcaagctggcggcctggtaacatttgctcatcaaagatctttctttgatacttatctccttttttcccctcaacatggccctcgcgcggtgtgcctgccgcgcgggggccgactcctttttcacggctttcaaatttttccgaaaaagggcttgacagccatggttagccatgataaactacaaaaccgaaagaaggttagcaaaagctaaccacagaacagatccaagtggaagaagtgtcttgcagaggagggaggttttatgatgcctctgacaatggcccggccgggagagactgttacgatccgcaagatcaccggcagggatgaggtccggcagcatctggcggagctgggattcgtggtgaacagtgatgtcacggtggtcagccagctggccggcaatctgatcctgcaggtgaaggacagccgggtggcattggacaagaccatggcgaaccggatcatgatttgagagcagagtaggaggaagaatatgaagagcctgaaagatgtcaaggtgggggagaccgccacagtggtcaaactccacggagagggcgctaccaagcgccggatcatggatatgggcattaccaagggcgtggagatccacgtccgcaaggttgcgcctctgggcgatccgatggagctgaatgtgcggggctatgagctcagtgtgcggaaggccgacgcggagaagatcgaggtctcttaaagaggggactgcgtccccctttacgctccggcagacctgcggtctgcctccactattcccccacaccagtgacggtggccactggtgtgtgcgccccagggacgcacgggtcgggggattttcggcaggtacacgccctgccgaaaatgatttcattttgttctttcgccactggcgaaagaaccggggaagccggaggtttcccctggcccccctttcccggatgatgcggggacggtggaaatatcaatggcggctgttgccgctgtttttcaggatgaaagttagcctaaactaacactttggaaggagagaacgatggacatgaagatcgcactggccggcaatccgaactgcggcaagactacgctgttcaacgacttgaccggctccaaccagtacgtgggcaactggcccggcgtcacagtggaaaagaaggagggccggctgaagggacgcaaggatatcgtcatccaggacctgcccggcatttactccctgtccccctatacactggaggaagtggtggcccggaactatctggtgaaggagaagcccgacgccattttgaacatcgtggacggcaccaatatcgagcggaacctgtacctgaccacccagctgatcgaactgggcctgcccgtggtggtggcggtgaacatgatggacctggtccgcagaaacggcgaccagatcgacgccaggaagctgagtgacgccctgggctgccaggtggtggagatcagcgccctgaagggcgagggcggcgtggaggctgcggagctggctgccaagatggcccagcagaagcgcgccgctgaactgccccacgtgttcacgggcagcgtggagcacgccatcgcccacatcgaggagtccatccagggtatggtggacgaccgatatctccgctggtacgcggtgaaggtctttgagcgggacgagaaggtcctggcggacctgaacctgagcacagacctccgggcccacctggaggaccacatcgtggactgcgagaaggagctggatgacgacgcggagagcatcatcaccaaccagcggtatgcgtacatcaacgatctggtgacgaaggccgtcaagaagaagggcgagaaacatcgcctctccacctccgacaagatcgaccagatcgtcaccaaccggatcctggccctgcccatcttcgccgtggtgatgttcgcggtgtattggatcgccatgggtcccttcggcaccttcctgacggactggaccaacgatgtgctgggcactgcctggctggtggagatcccccgtgccgccctggagggctggggcgtcaacgaagtggtcgtgggcctgatctgcgacggcgccctggccggtgtcggcgcggtgctgggcttcgtgccccagatgctggtactgttcctgatgctggccattctggaggacatcggctacatggcgcgaatcgccttcatcatggaccggatcttccggaagttcggcctctccggcaagagcttcatccccatgctggtgggcaccggctgcggtgtccccggcgtcatggcctctcggaccattgagaacgagcgggaccgccgcatgacggtcatgaccacctgcttcatcccctgcggcgctaagatgcccatcatcggcctgatcgccggcgccctgttcggtggctccggcctggtggccgcatccgcttacttcatcggtgtggcggccatcgtcatctccggtatcatcctgaaaaagaccaagatgttcgccggcgacccggcgcccttcgtcatggagctgcctgcttaccacatcccctccgtgggcaacgtactgcgggccacctgggagcggggctggtccttcatcaagcgggccggcacggtgatcctggcctcctctatcatcctgtggttcctccagggcttcggttgggagaacggcgccttcggcctggtggaggacatgaataactccgtcttggccgctatcggcagtgccgtggccttcattttcgtgcccctgggcttcggcaactggcgggccactgtggccgtggtcacgggcctgatcgccaaggagaacgtagtggccaccttcggcgtgctgtacaacttcgctggggagctcagtgagaacggcgacgagatttgggctctggtggcacaggactacaccgccatttccgcctactcctttatgatcttcaacctgctgtgcgccccctgtttcgcggccatgggcgccatcaagcgggagatgaacaacgccaagtggaccgcctttgccatcggctatatgtgcgtgttcgcctatgtggtctccctgattgtctatcagatcggcggcctcatcaccggcgaggtctccttcggcatcggcactgtggtggccgtggtcctggttgtgggcattgtgtacctgctgttccgtaagaacaagtacgaggacgagcggctgaccatccgctcggtggatgccgccggacgccgcgccgccctgaaataagaaaggaagcagccaatgaacgcacccactatcatcgcggccctcatcgtcctggtggtctttgcggccatcgtaggcaagggcatctacaaccggcgtcacggaaagggcggctgctcctgcggcggcgactgcggggcctgcggcggatgccactgcggaaatacccgtcattcctgacgagcggaagcccggccccaccgggcggaaggaggcgttccatttcatggaactgagccaagcgcatctgcggtatctgttggccattggcgagctgtcccagggaaaggcggcggtcagctccacccaggtggcccgggtcctccaggtgtcccgcccctccgtcacccggatgctggctgtcctggcggaaaaggacctggtgaccaaggaacgctacggcaagatcaccctgacggagacgggggcggccctggcccatcagctgcaagcgggcctccgggacctggagcggcggctgccggccctgggcctggacctggaccgggaagagaccgccgccgtggcgggggccctggcctcagtcctgccggagcactgtctccgaaagctctgcacgaccgaatccggcgggacaatgggatgtgccacgccttaaaaaagcagtcctgcggcttttgccgcaggactgcctcttttcttgagcatagaactataaaagagatatgatatattttgagaagacccggggccattgggccgccaggtccttttgtttccgatcctttatcttcacgctctattccagtctctgtaccgcggctcccagcacgccgtcgccgatgtagacgctcaacgtaccatccagctcgccgctccagatgtggtcgtagtttggcagggcggtggtgagcttgccctgcagaatctccatctccgccggagcgccgccgttggccaccgccagattgtaccgcgccgcgccgttgtgggactgcgtcaccagctcgatgagcttgcggatcaccaggttccggccccggaccttggcaatggactggagctgcccgtcggcggcgaaggtgatgaggggcttgatctggagcatggtgcccgccatggccgtcaccttgccgatgcggccgcctttctgtagatattccagcgtgtccacggagaaaaaggggaaggtgttctggatcaaccaaggcacccggcgctctgtcagcgtctgccagtccatcccctgccgcagctcctctgccagctggaggatcatcataccggtgcccagagacccgctgacggagtcatacacccgaatggtcaggtccctccgctcctccgccagcagccgcaccatgttgtaggtgccggataggccgccggagagcatcagggcgatgaccccgtcataccccgccgcggcgatggcgtcaaaggcgtccgaaatgtcctgagcggcgggcagggaggtctgaggcagctctccggaccgcagccgggcatagatgtcggcggcgtggatgtctacgccgtcccggtactctccgtctttgcacaggatccgcaggggcacgacaaagacctggttttccgccgccagttgaggggagaggtccgcgcaggaatccgtgagcagggcgattttttggggtgtcatggtcacatctccaaacctttctctcatgcagggccggcagacctgtccgccggatcggatgatatggtgtgcccattccgtcacaccatatcaatataacctagtatatggaatgctaccgtaaaaatcaagaggaaaatccccgtaggggaacaggaagcccgttcctgtctactggtgaaattttgtagcgagaggacttgccaaaggcggcggatttccggtatgataaaacacaggatctgaaagggaggaaagaccgtgccgctggatgtgaaggccgctgtggcggatgcactgctggagctcattcgccggaaggatgcagacaagatcaccgtgaaggacctggtggaggtctgtgggatctcccgtcagacgttttactaccacttcaaggacattgtggatgtggtggagtgggcggctcagcagggagtccagcgactggtgcgcgagagcctgaacgccgccaccccccaggaggccctgggcgtcttcgtggattttgccgtagaatcccagcccctggttcagcggctgctgaactcccagcggcgggaggccatagagcggatcatggtggacgccacccgtacatacctggcggacagcctgcgggagcggcggggaacgcccgccctccgggccggggactggaagattgccctggatttctatgcctatgggatgaccggactgctgctggagaactgccgccagcgggatctggaccggcaggagctggcggatcagctgttccgcctgctgtccggcgagatggtccgccctccggaaacctgacagatgtgcccgcgtgtcaaagagcttgacacgcgggcatttttgtcaggacagacagcctcctctgccagtggcgcgcacggagcggacgtggtataaccacagcatgagagcggagacagcgcagtgaccggaaaggagtgcgcgcatggaattgagagatggaatgtttgccgtgaagctctgcgagctggagcatcagtacggcctgctgagaagccgcctggagctgtgccagggggcggaccacgagaagatccggcacctgctggcggacgtgctggatgactatcgggaaaacgccctgctgctggagcagagcgcggagggctgccgctccccggcagtggcggagctggcgggcgtccagcgggactactccaaacggatggaggagctgctgcgggacaggctgccccgcctgatgcacggggaagaggacccgcaggaggagcgggcggaggcagcggcccttttcgcggagtacgccatcgacttcgcggcccagggcgtgcgcagcgccctgctggcggccctggccgccatggaccaacagatgaactgtgaggaacaacaaggaaaggaacatcccgtatgaaagaagtcagacccccgaaacggcccttgattttttactactgcgtggccatgctgattctgctgctgttcaacttcctggccatgccctggatggcccgccagcagatccaggaggtggattacggcaccttcatggacatggcggaaaaccaggatctgggccaagtggagatccaggagcaggagaaccagatcgtctttaccaacaaggatgagaccgccgtctactccaccggcatgatcccggatccggacctgaaacagatgctgaaggactccggcgcggagttctccggccaagtcatccagcagacggatcccatcctcagctttctgctgacctggatcctgcccatcgtcatctttgttgccctggggcagtatctctcccggcgcatgatgaagaacatgggcggccccaacgccatggccttcggcaagtccaacgccaaggtgtatgtcaagtcctctgagggcatcaaattctccgacgtggccggagaggacgaggccaaggacaatctcaaggagatcgtggagtacctccacgacccaaagaagtatcaggagatcggcgccaccatgcccaagggcatcctgctggtaggccctcccggcaccggcaagaccatgctggccaaggccgtggcaggcgaggccaacgtgcccttcttctccatctccggctccgacttcgtggaaatgttcgtgggcatgggcgccagcaaggtgcgggacctgttcaagcaggccaaggagaaggccccctgcatcgtgttcatcgacgagatcgacgccatcggccagaagcggaattccggcgcctatggcggaaacgacgagcgggagcagaccctgaaccagctgctgaccgagatggacggctttgagggcaataccggcgtcatcatcctggcggccaccaaccggccggagtccctggaccccgccctgacccggcccggccggtttgaccggcgggtgccggtggagctgccggacctacagggccgggaggatattctgaaggtccacgccaagaagatcaaggtggcggaggacgtggattggggcaaggtggcccgaatggcatccggcgccagcggcgcagagctggccaacatcgtcaacgaggcggcgctgcgggctgtccgggacggccgccgctttgctgcccaggcagatctggaagagagcatcgaggtggtcatcgcaggctaccagaagaagaacgccatcctgacagaccaggagaagaaggtggtggcctaccacgagatcggccacgctttggtcgcggccaagcagaccaattccgcccctgtacagaagatcaccatcgtgccccggacctccggcgccctgggctacaccatgcaggtggaggagggcaaccactacctgatgagccaggaggagctggagaacaagatcgccacgcttaccggcggccgggcggcggaagagctggtcttccactccgcctccaccggcgcctccaatgacatcgagcaggccaccaagctggcccgggccatgattacccggtacggcatgagccctgactttgacatggtggccctggagacagtgcaaaatcagtacttggggggcgacgcctccctggcctgctccgccgagactgcggcggagatcgaccggcaggtggtggagctggtgaagcgccagcacgaaaaggccaaccgaatcctctcggagaaccgggagaagctggacgagctggcccggtatctgtacgaaaaggagacgattaccggtgacgagttcatggagatcctgaatcagtgagcatccgatccgtaaatcagaaaagaggaggcgcccttcggcgcctcctcttttgctgccgtctcacagccccaggccgtagatgcggttggcgttgtcaaagaacaccggctcccagtgtgtctccggcaccagccggcggataaagccgatatattctcccaggttgacaatgggccagtcggtcccgaacatcaccttgtcccagcactggatggccgtcagccaggtgcgcagcaggaacacgtagcccgcctgctcccggaaataggcgtccaggtccacccgcccctccagaaggccggacaggtcggcggccacattgggatttttctccaccactgccgccgcggcctccagaaaggggttgccgaagtggcacatgacgaactgggtatccggatggtctgccgccacctcatccagggccagggggtggcagtatttcagatgggcccgggagaaggcggtcagccccatgtgaacggccaccggcttaccgtaacgggctgccaggcggtagatgggctggtacatggggtccgacagagcgatcttgttgtacccggggtacagcttcacgccgcagcagttgtcccgccgcaggtgcgcctccacccggtccgccaggtccgggatcacccggctcccgtcctccagcaggctgctgtccaggcccacgcagtagtggaacaggtctgtggggtagtcgtgccgccggagctccagactgtgatttcccatcaccacgccgtgggcaatgtgcagttctccatagacctcccgcagatggtctacgttgttgtgatggcccacctgccgggccatctcctcggcagaatcttccgaaaacaggtgcaggtgggcgtcgatgatcttcatacccgcagttctccttccagttcgccccggtatccagcggagcggcgatttttcaacaccgctattataacagagtttgccgccttcgcaacccccgtatgaaaacggttcccgaaaaaagcacagaggtcagtgacctctgtgcttttcctttcgacgcgcctgccgcagctggaacttccgcgcttcctccgcctcccgctgttggcgggtgcgggcgagacgggcctgcttcccctgctcctgttggagcttcagggcctgctgggccttggtgccgatccctgcggcctgggtcatccgccgggcctcccgctggcgccgcttggggcttttgggagggggcagatgctctgtccctggccggggcgggctgaatcgcagcgtccgccagtgttccagaagataggcgtagacctcctggtcccggggctccgcgccgaagacgatccggcagacggagtactccgtgtcatcctcccgctcgtacaggccgatccagaagggatcgtcgaacaggatggtgagcctgcttgtgcccatgcgtgtgtcctcctttaaaggtctcgcacaaagaacggacaaccaaggaggcaggttactgacggcacatgggccgctcccggactaccaaccgggacgtgtttttatctttgcgctatcagcataccacagcgggcgcgggatggcaaggccgggagacaaagcgtcccttttcccatcagccgcggcggtcgtatgatatgataaaagggaccgaaacaagctgtaagatttgatcgcaaaccttgtgtatatcagtgaaggggtaaataagaagcgaggtgaaagccgatggatgacacaacaatcgtccagttatactgggatcgagatgagcgggccatccccgccacatccggcaaatatggaaactactgtaactcgatcgcctggaacatcctgggcaatcgggaagacgccgaagaatgcgtcaatgatacctatctgtgtgcatggacctctatgccgccccacaggcccagggttctgtccgcattcctggggaagctcacgagaaacttgtccctgaaccgatacaagcatcatatcgcggagaaacgaggcggcggagaggccccggctgtgctggatgaaattgcggagctcgtatccgacacggacaacgtggagcgggcagtggaccgcagggaacttgtaagggcgatcgacacttttttggagaggcttccagcggataagaggcgcatttttgtctgccggtactggtatttcgatccggtttccaagatcgcgtcccggtttggaatgacggagaaccatgtatccgtaacactgaatcgcctccggctgaaattacacaactatcttcaggaaaggggctttgacctgtgaaaagagaggaattttgcgaagtcctcggtgacatcaatgagaactatgtgaaagaggccggagcaaatcccaaagccgagaagcggaggcggtttaagtggaaagtgatcgcggcctgtttatgcctgctgcttgcggcgccgctgaccgtattcgccatggataccattcagtatcatgcggcagtggattatctgcgttccctcgggatccccgttgaagatctgagcgactactcccgcacggaaatcaaagaggccgtgaaaacgatggatgcgggagaaagcagcctgctgacggaagaaattctgaacctgctgccagatagcggagaaccgatacaaaggccaacacaggtgacatcagaacaggtcagggaattgacaccgaccatgacgcgagaagaggtcctttcatttttgggcgatacccaggacatcggttccggcatttacatatatatttataaagtagacggagaagcactgctgcggatcccgtttgcaagtgatgaagcgcagctgggggtcacaggagaagaactattaaagaccttatccccgtaagggcgcaggaagggctgatgcggaaacgtcccgttatttccctcccaaaaagggcggcccctacgaccgccaggggagcgcgcagcgactgcgcatccgttgacggctgtgccgccttacggttgcggcgtgcccgatgcgggcaagcggagcgcgcagaaggagggaaaccagcggaacactggtgtcgcaaatactgagagcgccgcagcgcgagacagaaaaacagaggcagatcgaaggcgtccttacaccctgattttggtcggcacttcgccgcgggaatcaactgccaagtctctgcggcactccgccgcgcccgccgggatgccatcgtaaacccgcaggcaccctctcatgccgcccccatacagcaactttgcatgcacgtgccggagcgcgacaaaaggcgttcttttggaatgtgcattgggacaagccgtcatcgcggctgaatccccctatgtgggacccataaaaaagcggctggccttccgtccagccgcctcgtattttctggcaggaaaaatctctcagctccgctgattccccgaattggtggtgtccttcagcagcacgtcatgggctccgccctccacaatggagacggaggacaccagggtcaacttggccttctcccgcagttccgggatggtcagcgcgccgcagttgcacatggtggaccgcaccttggaaagggtggtggccatgccgtccgacagcttgccggcatagggcacgtaggagtccacgccctcctcgaaggagagcttggccgctccgcccaggtcgtaccgctgccagttcctggcccgggcgctgccctcgccccagtactccttcatatagctgccgccgatcagcaccttgctggtgggggactcgtcgaaccgggagaaataccgccccagcatacagaagtccgcgcccatggccagggccagggtgatgtggtagtcctggacaatgccgccgtcggcacagatgggcacgtagacgccggtctcggcaaaataccggtcccgctctgccgccacatcgatgaccgccgtggcctggccccggccgatgcctttggtctcccgggtgatgcagatggagccgccgccgatgcccaccttcacgaagtcggcaccgcaatccgccaggaagcggaagccctcgccatccaccacgttgccggcgcccaccttcacggtgtcgccatagcgggagcgaatccaggccagggtccgcttctgccactcggagtagccctcggaggagtcgatcaccagcacgtccgcgccggcctccaccagggcgggcacccgttcctcatagtcccgggagttgatgccggcgcccaccacataccgcttctgactgtccagcagctccagggggttgcccttgtgggagtcgtagtccttccggaacacgaagctcaccagatgcccgccggcggagacgatgggcagggcgttgagcttgtggtcccagatgatatcattggcggccttcaggctggtgccctccggggcggagacgattttctccgccggggtcatgaattcgctgaccggggtggccgggtccatgcggctcacccggtagtcccggctggtgacgaggcccagcagctttccggtgccggtgccgtcatccgtgaccgccatggtggagtggccggtccgttccttcaaggccagcacgtccgccagcgtgtcccccaggcggagattggagtcgctgatgacaaagcccgccttgtagttcttcaccctccgtaccatctccgcctgctgctcgatgggctgggagacatagatgaaggcgatgccgccctccttcgccagggcgatgcccatctgctctccggataccgcctgcatgacggcggagaccatgggcacgttcatggtgagagcgggctcctccccccgccggtacttcaccaccggggtcttgagggagacgtttgcgggaatgcactccgcggaggagtagccgggcaccagcaggtactcactgaaggtacgggagggctcggagaaaaaataagccatagggccacctcatttcatcagatttcaagtggaagctggatttacaggtccagctggaaaaacagtgtggactccacaggactgtcgttgtagcaggggatctcgtaaaatcccagctgccggtagaggcggacggcatcctccagaaccggcagggtgtccagcagcatacagcggtagccgatctgccgcgcgtcctctgtgatccggcggatcagctgccgggcaagcccccggccccggtactgcggctggacgtacaggcgcttcatttcgcatcgctcgccgtccagccgccgcagggcgatacagcccgccgcccgcccgtccacccgggccaggtacagccgtccgtccggcggggcgtacttggcggcgggggcgcgcagctcgtccgcatagtgctggatgtccagatagatttgaaaagctgggtcgtgcgtcaccagcatggcggtgtacgcctcaaacagggcccgaacgtctgagagggcattataggccggttcgatcacaacggttgaatccatattcaagcacctcccggcggatgtttcagatatgatacccggttccggccggtctgtcaaccgttagagagaaaaatagtcctttgcggcatcgaacaggccaagatcgtaattccccgggatatttcggtacaggcagggccccacccgctcggcgtgccccatcttgccgaagacccggccgtcgggtgaggtgatgccctctaccgaccagacggagccgttggggttgccgtcgatatccatggtgggatggccgtccagatccacgtactgggtggcgatctggccgttttccgccaactgtgccaagagatccggcgggcagaggaaccgcccttccccgtgggagatggggacgctgacgatgtcccccacctggaccttggtcagccagggggaccggttggaggccacccgggtccggacgatccgggactggtggcggccgatgacattgtaagtcagcgtggggcaggcggcatctgtgtcccggatttctccgaaggggaccagccccagcttgatgagggcctggaagccgttgcagatgcccaggacgaggccatcccggttttgcagcaggtccatcaccgcgtctgcggcctggggggaccggagaaaggcggtgatgaacttgccggagccgtcgggctcgtcgccgccggagaagccgccgggcaggaagaggatctgactgctccgggctgcctgggcaaaccgggcggcggatgccgccacatggtccggtgtctgattattcagcaccaggatctgcggctccaggccagcccgtagcgccgcccgggcgctgtcgtactcgcagttggtgccgggaaacacaggaatcagcacctttggctttgccgtgcctgtccggggagcggcgcgggagaaggccggggcctccagtaccggcaccagcgcaggatcggcagggactcggctggggtatacatcctccagcacggactcgttcagggagagcagctcgtcgatggagacgctgtcagcgccggtggtgaggaccggctccgccgtggtggtgcccagcctgacggcgcagaggaggtctgtgtcctccgtcagctccgccacaatggcgccagggcacggcaggtcccaggcgatctcacgcccctcggcctgaaagccgatggagttaccgaaggacatctgcataatcccctcggcgatgccgtgctccaccgcccaggcggagcacaccctgcccgcccggcaaagctggtggaaggtctcccaggcttccctctggctctgggcgccgccgttggcgggagcaaagaggtacaccggatgtcccgcctccttgaactcgggggagagcacctccccggcccggatgggggcgatggcaaaggagatgagggtagggggcacgtccagatcgttgaaggtgccggacatggagtccttgccgccgatggccgccgcgccgaagtccagctgggcgtccagagcccccagcagggcggcgaagggcttgccccagcgtgcggggtcctcccggagcttttcaaagaactcctggagggtgaggtaggcccttcgatagtctgccccggcggccaccagcttggcaagggaggtgaccacaccgttataggccccccggtaggggtccgccgccatagcctccgggtcgaagccccaggccataacgctggcctggtccgtctcctgccccggcagcaccggcagaagggcggccatcacctgggcgggggttctctgatttctgccgccgaagggcatcaacacgctgccacagccgatggtggaatcgaaccgctccgccagccctctgcgggaggcggacgccagactggaggctatggagcggagggaggagttttcggcatcctgggagaccggggacgcgggaatgggggcaggaaccgccgcccgggcgtgcttcacggcgccgttggtgttcaggaagtcccggctcaggtccacgatggtcctgccccgccagcgcatcaccatccggggggacgccgtcaccaccgccacggggtacgcttccagattctccgcctccgcggcggcgatgaatcggtctgcgtttgaccgggccaccaccactgccattcgctcctgggactcggagatggccagctctgtgccgtccaggccgtcgtacttcttccgcactgcgtccagatcgatatccaggccgtccgccagctcacccacggccacggatacgccgcctgcgccgaagtcgttgcaccgcttgatgagccgggtgacattcccatcccggaacagccgctggatcttccgctcctccggggcgttgcccttctggacctcgctggccatggtggtgagagactgcctgttgtggctcttggaggagccggtggcgccgccgatgccgtcccggccggtgcgcccccccagcaggatcaccacgtccccgggctggggccgttcgcggaccacattctccgccggggcggcggccaccaccacgccgcactccaaatgcttggcgatgtagccggggtgatatacctcgctgaccagccctgtggccaggccgatctggttgccgtaggaggagtagcccgccgcggcggtctgggcgagcttgcgctggggcagcttgccggacagggtctccgccaccggcgtccgggggtcgccgcagccggtgagccgcatggcctggtggacgtaggcccggccggacaggggatcccggatgcagccgccgatgcaggtggccgcgccgccgaagggctcgatctccgtggggtggttgtgggtttcgttcttgaacatcagcagccagtcctggggcttgtcgttcacctgggcggcgacatggatggagcaggcgttgatctcctcactctcgtcaatttccggcagaagcccccgtcgcttcagcaccttggcgccgatggtggcgatatccatgagggtctgtggccgctgggcagctttctctgtcccatagacctcctcccgggcggccagataccggttataggcggcctggaccgccggatcgttgatctccacgtggtccagatgggtggagaacgtggtgtggcggcagtggtcggaccagtaggtgtccaccacccggatctccgtcagggtggggtcccggcgctccgagtcccggaagtatgcctggaggaacgacaggtcctccaggtccatggcgagacccagccgcgccagcagggtatccaggcccgcccggtccagggcagtgaagcccgtgaccgtttccacgtctgccgggacggcggtctctgccgccagccgctccggcaggtccaaagacgcctcccggcactccacggggttgaggacataccgcttcaccgcgtccacatccgccgccgtcaggggaccgaagagcagatagatcctggcggtgcggaccgtgggccgctcctcctgagtcatcagctgaatacactgggcggcggagtccgcccgctggtcgaactgtcccggcaggggctccacgccgaaggcgatgcagtccccggcgggcagggctgcggcagtatcgtccacctgaggctcagagaacactgtccccaccgcccggcggaaggcggcctcgtccaggccctccacgtcatagcggttcagcaggcgcaggtcctccaaggcggagacgcccaccacggtctgcagctcgtgcagcaggccccgggcctcctgccggagccccggcttcttttccacatagatccgtcttaccatcgtatgacctcccggcgccggttgggcgctcatcaaaatatgcgtttcagtccgccagagccgccagagcccgctggccgatgtcatggcgcaggtatttgccgtcaaagtccaccgccctggcggcggcgtaggcgtcgtgcaaagcctgccgcaaagtgggaccggtggcggtgacgcccagtacccggccgccgctggtgaccagctgcccattctcgtccagtctgtccccggcgtggtagatggtcacgtttcccggtgccgacgcgggcagagagatgggcttacccttttcgtagtgccctggatacccgccggaggccaagatcacacaggcggcggaggcgtgccgccattccacggtgagcgatcccagggtctcgctttccaccgcctgcatgaccgtcagcaggtctgttttcagcaggggcagcaccacctgggtctccgggtccccgaagcggcagttgtactcgatgaccttgggcccgtccggggtcagcatcaaaccgaagtacaggcagcccttgaaggggcagctttccgcccgcatggcggccagagtgggcaggaagatggtgtccatgcacactcgggcgatgtcctcggtgtagcaggggttgggagccacggtgcccatgccgccggtgttggggccagtatctccgtcccccacccgcttgtggtccatggaggacaccatgggggcgatggcggtgccgtcggtgaaagccaggacgctgacctccgggccagtcaaaaactcctcgatcaccacccggctgccggagtccccgaaggcccggtcctccatcatggtcctgacggcatcctctgcctcttcataggaccgggagatcagcacgcccttgcccagggccagaccgtccgccttgatgacgatggggaaggaggcggttttcaaataggcgagcgccgcagcgggcgtatcgaacacctcatatcgggcggtggggatgtgatattttttcatcaggtccttggcaaagaccttgctggactcgatccgggcggctctggcgtccggcccgaagcaggggatgcccgcggcgtggagggcgtccacacaccccagagccagaggatcgtccggcgccaccaccgcgaaccccacggcgtgggagacggcgaagtccacaatagcgccgatgtctgtggcgctgatctgcggcacacaaacggcgtcagcggcgatgccgccgttgcccggcagggcgtaaatcgtctccaccaccggattttctttcagttttttgatgatggcgtgctcccggccgccgccgcctactacgagaagatccatcgaatcgtcctccttgcttcgtgtataaaacagtgtgaagagagaccggggaaaaccggacaggctttcccggttgatttgccatcgcaaatcagaaaaggaaacttcattgcccctatccgggcccagactcggcagacccggcggcaggatgccggacaggcccgcttctcttcaaagacgctcagtggtggaacagccgcatccctgtaaacgctatcaccatgccgtatttgttggctgtttcaatgacatggtcatcccggatggaaccgccgggctcaacgatgtactggacgccggattttctcgcccgctccacattatcgccgaaggggaagaaggcgtcggagccgcatgtgacgccggtgagggctgcgatccaggtttttttctcctccgccgtcagaggatcggggcgcacggcgaaggtcttctgccagatgccctccgccagcacgtcctcatactcgtcggagagatatacatcgatggcgttatcccggtccgggcggcgaatgttctccacgaattgcaggcccagcaccttgggatggtggcggagccaccaggtgtccgccttggtgcccgccaggcgggtgcagtggatgcggctctgctggcccgctcccacgccgatggcctgtccgtccttcacgtagcagacggagttggactgggtgtatttcagggtgatgagggccacgatcatgtcccgcttggccgcttccggcaggtccttgttctccgtgacaaggttggtgaggagcgcctcattgatctcaaagttgttccgcccctgttggaaggtgacgccgaacgcgtccttgtactcctggggggcggggacgtagtccgggtcgatctgcacgacgttgtaattgcccttcttcttggttttcaatatctccagggcttcgtcggtgtagccgggggcgatgatgccgtcggacacctcatatttcagataccgggcggtggcggcgtcgcacacgtcggagagggccgcccagtccccgtaggagcacagccggtccgcaccccgggcccggatgtaggcacaggcgatgggggaaaggtctgcgccctcctccacaaagtacatctgccgctccacatccctgagggggttgcccacggcggccccggcgggggacacgtgcttgaaggacgcggcggcgggcaggccggtggcttctttcagttcccgcaccagctgccaggcgttcagcgcgtccagaaagttgatgtatcccggcttgccgttcagcaccgtgaggggcaggtcggacccgtcccgcatgaagatgcgggcgggcttctggttgggattgcagccgtatttcagttccagttcgttcatgcctgggtctcctttccggaatacttgttgacgatgcgctgctggaagtcccgggtctccaggtctgtgaagcggacgaagagggagatcctgttggcctcgtccagagcgtcccaaacggcgctggcgaggctgtcaatgtccccttccacggccacctgctccggctctccggcaaaggagggcaggggatcgccgtctccggcgtaggtgtggaggaagtggccggtccccggctggccgggatactcgaaggtctgccgcaggcagcgtctgccggtcccgtcggcggctttcaggatggacagcttgtaactgccgttgggccccagcagcccggaaatccgcggggtccagttgggaccgtccggctcgaattcccgcgtgcggagggcctgctccatgggaaggccctgctttaaaaactccaggatggtgtccgtctggtccccgttggtgacgatgagtccccggcccatctgccgtaccgggtggtagatgatgaggctggggtcctccatcctggcggggtccgccgcctgggtacggatgccgtccggctcctccgcgaagacgcggttgcggctgttggcgctgcggcccatgatgaaatagacggccacggacgacttgccgtccggcgtcatgcccagcacgatcccacggccgggatagggattgccccgcagcagggcacataaatcctgtttcacagatgctcctccttttccgtggcgatgtgggcggccagctgttctgcggcctggggcagcagcacccactccgcctgttccatgacccggcgctgcaaggtttccggcgtgtcgccgggcagaatgtccaccgctttctgcagcaggatgcgccccccgtccgggatctcgttcaccagatggacggtagcgccggtgaccctgacgccacggcggagggctgcctcatggaccttcagcccgtaataccccttcccacagaaggcggggatcagggagggatggacgttgacgatccggtccggccagcgacggacgaagtccgcggacaggatggacaggaacccggccagcacgaccagatccacccggtactgcgtcagcgcctccatcagcgccgcctcaaacggctcctgccccagctgcttccgggacaggggaatggcaggcacgccgcggcgttttgcccgctccagagcgtaggcttcgggattgctggagaggaccagcacgatctccacgtggggcagggcgcctgcttcctgagcgttcagcagcgcctccaggttggtgccgccgccggagaccagcacagcgatacgggccttgttcagcataggatcacccgttcctctccggagatcacctcacctatcacatagccggggcagccgtgctgggccagggcggagagggcctggtccgccgtgtcccgggagacgatcaccgccatgccgacccccatgttgaaggtgttgaacatgtcccgctccgggatgtggccggtctcccggagcattttgaagatgggtggcgtccggacggcagccttctcaattttcaccgtcatcccatccggcaggcaccgggggatgttctcataaaagcccccgccggtgatgtggctgatgccgtggacctctgccgcgtcgatggcggccagcaccggcttcacatagatgcgggtgggggtcagcagggcctcgcccaggctctcccccagatcttcacagtagaccgtcagattggcatgctccacgtgaaagaccttccgcaccagggagaatccgttggagtggaggccggaggagggcagggccagcaccacgtccccggagcggacccggtccgggtcgatgatatcgcccttgtccacgatgcccacggaaaagcccgccaggtcgtattcctccggcgccatgatgccggggtgctcggcagtctcgccgccgatgagggcgcagcccgcctggacgcagccctctgccacgccggagacaatggcggccaccttctccggcacattcttgccgatggcgatgtagtccagaaagaacaggggctttgccccgcagcagatgatgtcgttgacgcacatggccacgcagtccacgcccacggtgtcgtgccggtccagcagctgggcgatgcggattttggtgcccaccccatcggtgccggacaccagcaccggctcacgtatgccggtcaggtccggggcgaacaacccgccaaagcctccaatgccggacactaccccggggatcctggtccgggccacgtggggggccatcagcttcacaccggcgtagcctgcggtgatgtccacgccggacttccggtagctctccgaataactctccatatcaggtcctctccctctcactgatcttgcactcgaatcggtctttgccgccgtcctggggcacggcggtggggtagcccccgccgaagcaggcggtgcagaagccgcactgggtattgtccgccagcttcaccacgtcctgcaggctcagataccccagggaatccacaccgatgatctttgcgatctcctccaccgagtggttgttggcgatgagcttgctggggtcatcgatgtccgtaccgtagtagcaggcggccacaaagggcggcgcgctgacccgcatgtggatctccttcgccccggctttccgcagcaggtcgatggtccggcggcaggtggtgccccggacgatggagtcgtcgatcagcaccacccgcttgccctccaccacggagcggatggggttcagcttgatattgacctcgttttcccgcatggcctgagtgggggagatgaaggtgcggccgatgtacttgttcttgatgaaccccatgccgtaggggataccgctctgccgggcgtagcccagggcggcgtccaggccggagtccggcacaccgatgacgatgtccgcctggaccgggtgctccagggccaggaaggccccggcccgctgccgtgccacgtggacgctggacccgtcgatgacggagtccggccgggcgaagtagatgaactcgaacacgcagagccgcttggggaccttgccgcagtggcgggtgtcggacttgacgccggacttgtccgccaccacgatctccccgggcaggatgtcccgctcgaaccgggcgccgatggcgtccagggcgcaggactcggaggcgaacaccacgcccccgtcccgcagtcgtcccatgcacagcggccggaagccgtgggggtcccggacggcgatgagcttggtgggggaggagatcaccagggagtaggccccctcgatccggtccatggcggcggagaccgcctcctcgatggagggggcgcgcaaacgctcctggacgatgatgtaggcgatgacctcggagtccgtggtggtctggaagatggagccctggctctccagctcctggcgcaatgcgtgggagttggtgaggttgccgttgtgggccagggccatgcggcccttgtagtggttcaccaggatgggctggacgttccgcttgttgtcggacccggtggtgccgtagcgcacgtggcctacggcgatggtgcccgtgcccagggagcggagccgctccgccggaaacacctcgttcaccagccccacatcccggtacgcggtgaacacgccatcatcgttcaccgcgatgccggcgctctcttggccccggtgctggagggcgtacagggcgtaataggccaggggggccacatccgtcgtctccggcgcgtacacgccgaacacgccgcactcctcttggatgtggcgggccgggagcacggcgctcagctcagtcggcatcatgggcaagcagtctctgcatgacctcggcataggcgccctccacgccgcccaggtcccggcggaagcggtccttgtccagcttctcatgggtcttttcgtcccagaggcggcaggtgtcggggctgatctcgtccgccagaacgatcgtgccgtcggtcagtctgccgaactccagcttgaagtccaccagcgtgacgccgcactctgcccagaaggccttgagaatgtcgttgacggcaaaggcgtacttcttgatggtctcgatctcctccgctgtggccagcttcagcgccagggcgtgatagctgttcagcaggggatctcccagttcgtcgttcttgtaggagaactcgatggtgggagcgtcgaatacgatgccctcctccacaccgtaccgcttggcgaaggacccggcagagaggttgcggatgataacctccagcggcacgatggagaccttcttcaccagggtctcccgctcactcagctcctgaacgaagtgggtgggaatgccggccttttcgatccgccgcatcagatggttggtcatctggttgttgatgacgcccttgcccgcaatggtgcccttcttcaggccgttgaaggcggtggcgtcgtccttgtagtccacgatgtaaagttccgggtcgtcggtgcggaagaccttcttggcctttccctcatagagctgttccagcttctgcatggtgcgttcgtcctttctttctgttgagagattagatatttgaataggcaattgataaaccattagaaaaacggaagggaaagagaaaatagaaatgagaaatcagaaatccggccgcgggatggcgcggatacggaactttgagccgtccggtcaggacggactcaagactttccgattcctcatttccgatttctcacgatttcaggagttcctcctggagcttggcgtccttctcggcgatctgctccgccatcttccgccgctccgcttccaggcgccgggtcagggcctcgtcctccaccgccaggatctgggcggccagcacagcagcatttttcgcgccgttcagtgctaccgtagccaccgggatgccgccgggcatctggactgtggccagcagggcatccagtccatccaggacgccccccttcatgggaatgccgatgacaggcagggtggtgttggcggcaaaggcccccgccagatgggcagccatgccggcggcgcagatgaccacgccgaatccccgctcccgggcggacttggcgaactcagccgcctgggtcggcgtccggtgggcgctgaggatatgggcctcataggggatgtccagggcgtccagctgggtacaggcccctttgaccacgggccagtcactgtcgctgcccatgatgacggcaacttttttcatcgcaagcgctcctttctgcggctcagagttttttccgcatgacggtgtggcggaagatgccgtccacaaaatactcgctggagcagaacacggggcgtccgtcgatgtcatagtccacctcttccatgttcagcagcggcgtgcccatgggcacctggaagatctccgccagggcggcatccgccgcggcgggccgcacgtctgtcagatccagatagggatagatgccgcagaaccgctggaggaagtggaagatggggagcttgaagtcctggatggtgtaatcccccttggccagggccttttccaccacgtcctcgcagtagatggcgggccggccatccgcggtgcacagccgggcgatgcggatgatgggggtgtcctccggaatgcggagctgagcggccacctgggcatcggcagtcccatcggaaacccggacaaaggccaccgccggctcatgtccgctctggcggatcatgtccaggaactctacctcaatgtccatgcgggtctggacgttcagcacatggcggttgatgatggtgccaactccgtggcggcgggtgatgaagccctcccgctccagagaggccagaatgtcccgcagctgcgtgcggctgattcccagcttctctgccaggacactctcccggggcaggcgctcgcagctggcgtaggcaccgtccttcatgtcggcaagcagctgagagcggatggtcttggtctgggccggctgaccgctcatagtcacacctctttctgatcttaaaataggtaataccataaaagtcatacctattgtaccggattttctccggcgccgcaactggcagatttgacagattccgccctccttttttgccccggcatatccagtctgctgttgacggcaggacgcacgggccggaggcgtttgtacggccggatttcgtgggttttcaccgtggacaaccgccggggggatgttataatggagttgaacgaaagagggaggcgttatccgtgaagattgtgatcctgggtgcggaggcccgttaccgggcctatcagcccgcgatgcccttcatccagcagcaggagctggtatttctggacaaggacagcacggaggcagagattctggccgccggcgctgatgcggaggtgctgttcgtggacgccatcacggtggtgtccgctgctctgatggaacacatgccctgcctgcggctgattcactcggagggggtggcgtttgaccgcattgacctctccgccgcccgggagcggggcatttacgtctgcaacaacaagggctgcaacgccggggccgtggcggagcagacggtcctgctgatactgatgctcctgcgccatgccctggagggggacgaggccgtccgggcgggacggcagatggagatgaaagagcggtgcatggtggaggggatcacggagctctctgcctgcaaggtgggcctggtaggatttggagacattgcgcgggccgcggcggagcggctggtccccttcggctgcgagctgtactactacaccaagcaccgccgcttgccggaagaggagaaaaaataccacgtcacctacctgccgttggaggagctggcggagaagagcgacatcgtcagcctccactgcgctgtcacggaggagacccggaatctggtggatgccgctctgctgcggcggatgaaacccacagcgtacctcatcaacaccgcccggggagaccttgtggacaacgaggccctgcggcaggccctgctggaggggcgaatcgctggagcggggttggacacgctgtccccggagccggtgccggcggggcaccccctgacggcgctgccgccggaggtccatcggaaagtggtcctggcaccccacctgggcggcattacagaggcatccttccgtcgggcccatgcccacatgtggcgaaatgtggagcatttggctgcgggagagcggccggacaacatcgtcaacggcctgtgatgctcgccgacggtaaaaaattctgccggagatgaaacaaaacctatggaaaaatcgtctaattcctataaagacctatggtagaaggaccatgtgcggtttgaaagtcctgcgcgcgagctgtgggtctgtatgcggaaaaccctcatgcgccaaccggcttgcctgttctcatggcccgcacggcgcatggagtcaggaaaaacaaagaaggggagcgtgacgccgaatgagacgtcggatctggagaggttggatattgtgcctgtgcgcctgcttgctgctgtgcggtgccgccagcgggactggaagcacaccgccggacgcggtgagccgcggggcctttgcagacgccctgtatgacgcccatgtggcccacggcggcgctcctgtggtcagcgagggcagctccgcacccttccgggatgtgggctcctggtctccgtatttcgaggcgctctgttgggctaaggccagcggcatcgcagggggctatgcaggcggtgccttccgtcctgcggcaccggtgacccgccagcaggcgacggtgatgctgtaccgctatgccaagaccacggacctgccgctggagaaggggagcgaccgggatctggccggataccgggacgtggataccatcccaacctggagtcgggaggctgtccaatgggccgtgcggaacggcctgtggttctccggcagcgccacggagctgcaggcggcggagaacgtctcctgggaggagctggccgttctgacccagcggctgttcctgggcgggatgcccgcggctgccttgtctgcggcgccggaggggctgacgatggagctgcagcaatgcactaccaccggcgcggttgtggtactgcaaaatgcggcggaggagaccttctcctatggggcggactacggtctctatcggcaggtgaacggcggctggtatcagatgaacaaggaaatggacaccatcgccattgcctatgagctggccccgggagagagccggaagcttaccctcagctggggagagctggactggggcggcgtcctgcccgccgggacctactgcgtggcgcagggcgggctgctgggagaacagcaggtcaccgtctccgtcacctttgccatcaaataaacgccaggcggccgccgaaaaaccggcggccgcctttccattgggtgaacggtgtcttgcgatcccgcccagaccgaaaaatctccccctcttctggaggagtgaagagaacagcacaggccgccgggaacgcccggcggcctgtacggattcttgagaaggtggcccggcgtcaaacacagaagcggcaggccgccagggccgccacagcgccgtccgcgcaggcggtggtcagctggcggacctccttggcgcggagatcccctgccgcaaagatgccgggaatcggcgtcaggcagtcctccccggcggcgataaagcccgcttcgtccaccggcacccccagagaccgggccagccggctctccggcagcagacccaccgcctggaacagcgcagagaccggcaggtgggagacttctcccacagcggtgttccgcagggtcaggccggtgaggcgttccgatccctccagggcctccaccacggtggaccgcagcagcgtgaggttggcggtcttctccgcccgctccaccagaatgggatccgcccggaagtccgaccgccggtggatcaccgtcacatggcggcagatgtctgccagatacagcgcatcctgcagggcggtgctgccgcctccggccactgccacatcctgtccggcgtaaaaggctccgtcgcacacagcgcagaaggagatgccggccagacgatcctcgcccgcaaggcccagggtccggcgccgcatcccggcggccaggattaccgccccggcggtataggcaccgtagtcggtgaccacccggctgggcgtgccgctctggatctccagcgcctcctccagttcgatccgggtccccagggcctcggcctggctgtacagccgctccgccagttcagcgccggacacggcgggcaggcccggaaagttttccaccttgggagaggaggcgatctgcccgccgaagctctcccgttccagcagcagaacggactttcctgcccggcgggcgtagacggcggcggtgagcccggccgggccgccgcccacgataatgatgtcgaaatactggtccatagatgttcctctctgatgactgacagaagataagggagacttcgcagtcccccgcatagtaaccgctgtaccgcgggtgctgctccgcagagacggcattttggagctcggaaaaggagggacgagagtccctcctttttcgttgtttacacgctctgcgaagtggcgaattttttgatggtggaggcgttcaccagcttctccacctgctctccgtggcggacgatcagggtgggggcctgctggataccgtaccgggccaccagctcccgatgctcgttcacgtccatcacctgataggcgatgcccgccttctccagctcccgctcggcgatgctgcagttggggcaggtcttggtggtgaagaggaacaggccgtcctcgccccactccgccggtgtgctgggcgcggtgccggctgcgggctccgtcgcagcatcccggtcgcagaggcggcggccctccagccgggagttctccacctggtactcctgccggtccttgaactcctggaccttgccgtcgttccagttctggacagggcggtaatagccggtgatgcggctccacacctcgcaggtcttcccacacttggggcaggtaaagtgctcgcccgagagatagccgtggtccggacagatggagtaggtgggggacatggtgtagtaggggagcttgaaattctccgcgatcttccgcaccaaattggcagccgccttccagtccggcagcttctcacccaaaaaggcgtggaacacagtgccggaggtgtacagggtctgcaggtcatcctggatggccagggcctcgaagatgtcgttggtgtagcccaccggcaggtgggaggagttggtgtaataaggcgtgtcaccggggttcttggcagcggtgatgatatcgggatacagtgccacgtcatgcttggccagccggtaggtggtggactcggcgggggtggcctccaggttgtagaggtcgccgtactgctcctgatagtccatcagtcgctcccgcatgtggttcagcacgtccttggcaaaggcctgggtctccggatgggtcaggtccttccgcagccacttggcgttcagacccacctcgttcatgccgatgaggccgatggtggagaagtggttgtcaaaggtgcccaggtagtatttggtgtaggggtacaatcccgcatccatcagcttggtgatgacggtgcgcttcaccttcaggctccgggcggcgatgtccatcatgtggtccagccgctcatagaactcctccggcgtctgggagaggtaggcgatccggggcagattgatagtcaccacgcccacggacccggtggactcgccggagccgaagtagccgccggacttcttccgcagctcccgcagatccagccgcaggcggcagcacatgctgcgcacgtcagaaggctccatgtcagagttgatgtagttggagaaatagggggtgccgtacttggcggtcatctcgaacaggaggcggttgttctccgtgtcggaccagtcaaagtcgcgcgtgatggaataggtggggatgggatactggaagccccggccgtcggcgtcgccctcggtcatgatctcgatgaacgccttgttcaccatatccatttccttcttgcagtcgccgtaagtgaaatcctgctccttgccgcctacgatggccggcaggttctccaggtcacgaggcacggtccagtccagggtgatgttggagaacggcgcctgggtaccccagcgggagggagtgttcacgccgaacacaaaggactggatacactgtttaacctctttctgggagaggttgtccactttcacaaagggggccagataggtgtcaaaggagctgaacgcctgggcgccggcccactcgttctgcatgatgcccaggaagttcaccatctggttgcagagagtggagaggtggctggccggggtggagttgatcttgcccgggatacccaggccctgctggatcagctgcttcaaactccagccggcgcagtagccggtgagcatggagaggtcgtggaggtggatggcgccgctcttgtgggcgtcggcaatctcctggtcatagatttcagagagccagtagttggcggtgatggcgccggagttggagaggatcaggccgcccacggagtaggtgacggtggagttctccttcacccgccagtcgttgatatgcaggtagttgtccaccagctccttgtagtccagcatggtggagttcaggttgcggatcttctcccgctgcttgcggtagagaatgtaggccttggccacgtcggcatagcctgccttgctgagaatgtcctccacgctgtcctgaatgtcttccacggtgatcttgccgtcatggatcttatcctggtaatccgccgtgaccctcagggccaggagatcaatgatgtccggattgtactccatgtgggtggcctcaaaggccttggtgatggcggtgctgatcttggagatgtcgaaagaggcgatctttccatcccgcttgacaacctgatacatgaaacccctgctttctctatgataaattcaattccctgctcctgacaagtcaatgggcgctgacgcgccccgtatttcccattctaccacttcctgggggcttgtcaattagaaatgccactatatcttgtatgcattttctgtgaaaacgctgaatttttccatatctagtcaatgccgcgcagctccacagctccaaagaacggccggacccgctccgcaaagccctgcagctgctctgctgtaaagccgtgatatccccggccgatcagattgccggagtccacaaagttctgaagatagtaccggggtgcccctgccagccaggcggcgatggcgtccaggtcctccggcctgtggagctcccgcaccagggtggtgcggaactcatagtccacggtgcttttccgcagcagacggatgctctcctccaccggggcggggttgaagcccggtatgccgacggtttcggcataccgcgccggagcgtttttcacgtccatggccacatagtccacaaggccctggttcaggatctccgccagccgggcaggatcacagccgttggtatccagcttcacggcaaagcccagttcccgcaccttccgcagaaaatccgctgcgtccggctggagcagcggctccccgccggtgaggaccaccccgtccaaaagcccccggcgggaggccaggaagtccagcacctcctgctccgggatctccggcgtctccgccagccgggtcaccagcaatgcgttgtggcagaaggggcaccgcaggttgcagccgccggtgaacaccgtggccgccagctttcccgggtagtccaccatggccagtttctgaagtccgtgaatgtgcatggccggatccctccataagcacaagatgttgctattctaaactgatttttccacaagaacaagtggtggacgcaacaaagacaaaaaagttcccggaggcagagcctccgggaacgggaaagacgggattcaattcttgcggaaccgggagaggaagtcctgcgtctcctgtttctggggattgccgaaaacctgctccggcgtgccctcctcgcagatgacgccctggttcatgtacaccacatggctgctgacgtcccgggcaaaggccatctcatgagtcaccaccagcatggtcatgccctcctgggccaggtcctgcatgacggagaggacttctcccaccatctccgggtccagggcggaggtgggttcgtcgaacagcagcacctccggctccatggccagggcccgggcaatggccacccgctgcttctggccgccggagatctgccggggcttggcttggatgtaaggcgccatgcccaccttttccagatactccatggcccgcttccgggcggtctccttgtcctttttcagtaccttgatctgcccgaccatgcaattttccagcacggtcatgttgttgaacaggttgaaggactggaacaccatgcccacatgggagcggtactgggggcattgaccttgggaccggtgacgttctggccgcggtagaggatctcgccgctggtgggggtctccagcaggttgatgcaccgcagcagggtgctcttgccggagccggaggcaccaatgatgctggtgacatcgccttttttcacggtgaaatcgatgtcccgcagcacttcgtggctgccgaaggacttgctcagatgccggatctctaaaatcatatcgtccatgttgtcagcgatctcctctcgtacggccgtgctgcaattcctgacggacccgatcccggtactctttgctccgctcatcgaagggagtgccccggtccgggtggctgtatgtgccggcggccatggtcagatggtccgtctgtgccagcttgtaatcgctgctgccgtccattcgcttttccaaccagcgcagcaggaaggaggcgatcagcgtcatggtgaggtacccggccatctccaccacggcggaggggaagtacaggtagctggcgcccaccgccgcccggtgggcggagaagaaatcggggaagccgatgatgaacatgacggacgtatccttcacattgatgatgaagttgttgccgatctggggcaggatattccggatggcctgaggcaggatcacatgcagcatggtctgcacatgggtcatgccgatggccttggcgccctcggtctggccggggtcgatggagataatgccgccccggacggactcggccatgtaggcgccggtgttgatggacaccaccagaatggcggccatccagatgctgtcaaaccgcacggcgttgtccgtaaaatagggcaggccgtaatagaggaacaccgcctgcagcaccatgggggtaccccggaagatctccacgtagatccggaccactgcccggatcagcgccagaaagaaccgcttgacgggcggggcgttcttgctgtggggaatggtgttcagaatgccgcagacgaatccgatcaggcagccgatggcggtggccaccagtgccagaatcaaggtattgcggatgccgggcagatagtgggacacgccgtagttcgaccagagcttggcaatgtcggatgccagctggaacagtttctccatggaggcagactcccttcggtaaagagttgatatgcgggaagcaggcgggaggacagactgtcctcccgccgcgggtcattctggaaagtgtttactcgctcaggggctgaatggcgatggcctcgttcatcagggtgttgaaatcgtccgccgtcatagtggagagcacgctgtcaatggcctccttcagctcggtgttgcccttcatcacggagatgccgatgttgatctcgccctcgtcaacctcaaagttgtcgtcggagtctgtgaagtccagaatcttcatgtcgggataggcggccacggcacccatagcggtgggcatatcggtgcagatgaagtccacggcgtcggtctccagggccatcagcatggcgggggcggtctccgcggcagtctggacctgggcgccctcgatctgaggcaggcaggagtcataccagatggtggcgatctgcgcggtgcaggtgccgccggaaaggtcgctgatgccggcggcgttggcataggggctgtccgtcttggtcacacagacgatggaggcgtagtagtaggggccggcgaaatccacctgctcgctgcgctcggcagtcatggactggccggcaatgacggcgtcaaaggtaccggtctgcacgccgggaaccagagagtcccagtcggactgaaccacttccagcttccagccgttggcctcgcagatctgcttggcgatcatcacgtcgtagccgttggcataggtgccgggcacgttggagatgggcacagcgccgttggagtcgtcgctctgactccagttgtaaggggcgtaggcgcactccatggcgatggtcagcacgccgtcctccacgccggaggagccggcggtctccccgccttcagcggtggtgccggaattgccggagtcggcagtgtcgccggagctgccggtgccgccgcaggcggccagggacgctgtcatggccagagccatcagcaaggtcaacaatctcttcatgtttcttcacctttctcatctcaaaaaagattccgcggcggtcacagacctcctccgcgcctgccgccggcggagaggagaaaaaatggaccgctttgtcaagcggtccatggaaaatacggaaagaagcccccggcagggacgatcccgaacagccattgatagcgcttcacaaaggtttgtgacagtccggcaggtattccctgacggcccagcaccagaaggacaggcatcgtcccggcacttcggcggcggacccttccccgtccggcggctgcctggccttgccggagcggtactgatgaacgccgcgcctctatctgagcgatccaattttgaaggtatcctatcacgttctcggggagatgtcaacgccccttcccagaaaaatgccaaaaatcccgcagatttgtgcagatcatagaagaaaatgccaaaaccgttgcgcactgtggggaaaatgtggtatgatgctccctgcacacacggcgcaagcgccgggagaggagtgtggaagtatgatgcaggcggcggaactggcggtgctggactggctccaggcccatctgcgctgcgattttctggacgcggtgatgccgtggatcagccggatctgcgaccacggagagatttggatcctgctggcggcggtgctgctgcttctgtggaagcaccgctggacagggatgtccctgtcctttgcgctgattctggatctgatctgctgcaatatcgttctgaaacccctggtcggccgggtccggcccttcttggtgaataccgcggtggagctgctgacagcacccccggcggacgcatcctttccctcggggcacacggcggcgtcctttgcggcggtgttcgccctccgggcctccggcagccccctgtggaagcctgccctggtactggcggctgggatcgccttctcccggctgtacctgtacgtccactggcccaccgacgtgctggggggcattctggtgggcgccgccgcaggctgggcaggcgcgcggctggcagacgccctccgccgcaggcgggagcggctgggccgcagggcatagcggaaaaaacggaccggacggcttgccgtccggtccgtgcggcttcacgcggcgttctccctggcctgaagatatttcttcacagcgaagatgcccgccaccgctgccacgcccagtagcgtctccgccgcgtcggtgtggctgacgatcatctgccggacgatggtgaacagcagcacgtccaccaccgcgtcggcggtgtgcagggccagcatcttcacgaactcaattcccatcaccagcagcagtgtggcggagaggaaatcccccagggcgaaggcctctggggagaggagcagggtccggccagtctcccggaacaaaaataccgccccgcagacgatcaccagcaggatcacggcggcgatgagcagctccaaagcacgggcggccttcaacaacaggatgtgggcgggatgacggttcatggtgcctccttgcgccgcggggcggcagaatgaagataagaaataaaaagggggataagagatgcccctctccgggaagtatctcttattcttttatctgggccttggacttgcaaaaacgaagagctcgtaaaaatgtaggggcggcaatctgccgcccggcgggaatagtgtgggggcgtcgtgttacccctcgtcgatgtcgaggctgccgacgggagccccggagggcagaaatttttcgccgtcggacactgtcaggtacataaagcctgtggaatccgctgattggtacaccagcgtacggtcctcgacggcaaagcggttgacgaatttttcatcatctgtggtgaggatcacggtgtctccgtccagtttccaggtgccgagcccaaaatagctgctcagggctccttcggaacatcgcatacttccgtcactgttgagggcgatatagaaatcgctcccaaacccctctttttcgtagatgtagacctggtcggcgaggtcgtcggcggttaccgctgccggctggccggaacagcccgccgccatgagagtaaagagcaggagcagggcggaaaacagacggcacttcatcatgatgtagccctcctttccatgatccgaaaacaggaccgcctctccatcaatctatcacagacggcggcccattgcaaggcaaacccgccttgcgtaaacgccggatttgggatatactatatctctatggaaaaatcagcctgcgggcaggaggaactccccatgaagctcatggtcatcgacggcaacagcatcctgaatcgggcctattacggcatccgtcctctcaccacacgggacgggctttacacccacgccatcttcggatttctcaccacgctccttcgactggagggggaggaggcaccggacgcgttgtgcgtcaccttcgacgtccacgctccaaccttccgccatcaggcgtcggaggcctacaaggccacccgcaagcccatgccggaggagctccgggtccaggtgccggtgctgaaagaggtgctggacgccctgaacattccccgttatgagcaggagggctgggaggccgatgacctgatcggcaccatctcccgcaagtgcgaggcggacggctgggactgcgtggtggtcaccggcgacaaggacagcctgcagctcattaccgaccacaccatggtgaagctggtgtccacccgcatggggcagaccaccaccaaggatatgacggagaccgccttccaagagcagtacggcttcgcccccatccacatgatcgacctgaaggccctgatgggggacagctccgacaacatccccggcgtccccggcatcggggagaagaccgccatggccctgatccagcagtacgagagcatcgacaacctgtacgccaaaatgccggacatcgaggccaagcctgccgccatccgcaagctggcggagggggaggagagcgcccgggagtcttactggctggccaccatcgttaccgacgcgcctctggacttccatcccgaggagaacctgtgccggaagcccggcccggacgcctacccgctgtttttgaagctggagttcaccaagctgatcgagaagttcggcctgtccccggcggagcagccagcggcggaaagggcggacttcaccatgaccgtggagcaggtcacagagcctgctcagacggagcggctgctggccctctggcgagcggcggaccatgtatcggtgctggccctgccggacctgacgggcctctctgtggtctgccggaccggggcggacaccggcgtcacggcggagctgttcttcgacaagtatcagggggactggaacgcccttttgaacgccctgttcgcggcggacgtccgcaaggtctcccacaatgtcaaggacctgacgcggacgctgctggaaaacggcctgcgggcggagggcttcgtcttcgacaccgccctggctgcctacctgctggacgccacggcggggagctatgaccttgcccgcctgttcgtcgcctatttcaacgaggagctgccaaaggccctctacctggaaccggacgccttctccctgctgggggacgccgccgcggcggaggccagcttcgacagctacgccgccgccgtggactccctgtacggcgccctggcggaaagactggcggagcggggccagatggacctgctgcatgagatcgagatgcccctctgcgccgtgctggcggagatggagaccgccggatgcagggtagacgccaaggccctcggtgctttcggggatctgctggcccggcggagcgccgagctggaacagcagatctacgccatggcgggggaggaattcaacatcaactcccccaagcagctgggggagatcctcttcggcaagctgggcctgccccatggcaaaaagaccaagaccggctggtccaccaacgccgatgtgctggaaaagctccggtacgaggcccccatcgtgggggcggtgctggagtatcgccagtacgccaagctgaaatccacctatgccgacggccttttgaaggccatggacccggacggccgggtgcggaccagcttccagatgacggtgacggccacgggccgcctctcctccacagagcctaatctccagaacatccccacccgcacggacctgggcagcgagatccggcggatgttcatcccggcggagggctgcgtcctagtggacgccgactactcccagatcgagctgcggctgctggcccacatggctggggacgaggccatgatcgccgccttccgctccggcggggacttccacgcggagacggcggccaaggtgttccacgtggcgccggaccaggtaactcatgagatgcgccgccaggccaaggcagtgaacttcggcatcgtctacggcatctccgccttctctctgagccaggacatcggcgtgagcgtggcggaggccaaggcgtatatggaggcctacttcgccaccttcccaggcgtccggacgtatatggacgccattgtggagcgggccagggagcagggctatgtggagacgctgttccaccggcggcgggacctgccggagctgaagtcctccaacttcaacctccgctccttcggggagcgagtggccctgaacatgcccatccagggcaccgcggcggacatcatgaagctggctatggtggcggtgcggaaacgcctgcggcaggaactgccggaggcccgtctggtgctgcaagtccacgacgagctgatcgtggagtgcccggaggcccaggcggagaccgccgcggcgctgctgaaggaggagatggagaacgtggtgtccctctccgtccccctaacggcggacgcccactggggcagaaactggctggaggccaagggctgatgggatttcagaagatcgactacgccgcgtggccccgccgtccgtattttgagcattaccaccgggacgtgccctgttggtacagcatgacggtggacgtggacatctccgccctactgccccgcctgcgggggtcgggactccggttctatccgtcggtgatccacggcatctcccggatggtcaacgcggacccggccctccgcatggctatggacgagacgggggccatcggcgtctacgaccgggtggaccccacttatacgatttttcacaaggacgatgagaccttctccgtcctctggaccgcctaccagccggatctgcgggccttctgccaggactgggaggcggaccggacccgctatggggacatccacacctttgaagcccgcccgccggaggcgggacagggactcttcaacatctccgccgtgccctgggcctccttccgaagtctgcacctggagctgccggaggccaacgactacctgctgcccatcttcaccctgggccgctaccggaaggagaacggccgcaccctgctgcctctggccatgcaggtccaccacggcgtcacggacggctttcacgtggggcggttcttcaaccgcctccaggcctgggcggacagtgcgccggagatgggcgcatgaagcgcctgtatatgatcggcggtcctatgggcgtgggaaagaccgccgcctgccgccagctgcagcagctgctggaccggagcgtgttcctggacggggactggtgctgggatgcccacccctttcaggtgacggaggagacccgggagatggtgttggagaacatctcttttctcctgaacagcttcctccgctgctccgcctatgaccatgtgattttctgctgggtcctgcaccggcgggaaatctgggaagacctgctccgccgcctgacggagccgtatgtcctgcgggccgtctccctggtctgcacaccggagaccctgcggtcccggctggagggagatatcctcgccggaaagcgaataccggatgtgttggaccggagcctggcctacctgccgctgtatgatgccctggacatccggcacctggatgtgacggctttgacgccccgggagacggcggagtgcatccgaagggagggcggcgcatgaagcggctgatcgtcctgctgggcgtggctggggtgtccctgtcggcggtgtttgtccggtggtccacggcgccgtccctgatcctggcgctgtaccggatggccttttcggcggcgctgatggcggtcccggtactggcgggacgaaggcgggagctgaaatccctgacccggcgggacgtgctgctgtgccttgccagcggcttgtttctgggcatccacttcgcggcgtattttggggccctgcgggccacctccatcgcctcggcggtggtgctggtggatacggaggtattctttgtggcagcggcctcggcgttgtttctggggcagcggctgccccgccggacctggcccgcggtcctgcttgcctttgcaggcagcgcggtggtggcgctggcagacagcgccgccgggacgaatgcgctgctgggagatttgattgccctggccggcgccgccgccatggcggtctataccatgatcggaacggtctgccggcagcggctctccacgtcagtgtacacctttctggtgtatacgtccgccgcggccacgctgctggctgcggccctgctgagcggaacgccgctggccggctacggtccggtgaacgggctgacggccctgggcatggcggtatgctgcaccctgctgggacacaatgtgttcagctgggggctgaaatatctgccgccggccttcatcgccacggtcaagctgatggagccggtgttcgcctctgtctggggactcctgctctttggcgagcggccgggctggctgacggttgccggaggcgcggcggtccttctgggcgtggggctgtatgcccgtaccatcggcggggatgccggaaaacgagaggagagagaaccatgagagaacagatgcacgtgcgcatcgtccccatgaccggggaccatctggacgaggtggcggagctggaacggatctgcttcaccaccccctggtcccggaacatgctggtggaggagctgcagaacgactgcgccgccttcctggtggccctggatgacgaggaccacgtggcgggctacgccggcctgctggtggtgctggacgaggggtacatcaccaatgtggccgtgcggccggagtgccgccgcaacggcatcgcccagaagctgctgcaagtgttcctggactttgcccaggcccacaagctggcgtttctgacgctggaggtccgggcctccaactacggggccatcgccctgtacggcagccggggcttccgcagcgtgggcaggcggaaaaactattacgagcatccgaaggaggatgccatcatcatgacaaaggagtttaccgatggaactgaggatcccgacactggagcagctgcggacggtctatgaccgggacctgcggacagcatttcccgcagcggagctgaagcccctgaagaatatggaggagatgtgggccgaggggcggtaccgcccctggtgcctctttgacggggacgacatcgccggcgaggcatttttatggctgggccaccccggctgggccctgctggactatctgtgcgtggccgcagaccgccggaacggcggcctgggctccgtgatcctggagaagctccgggaggcggagcggggcaatgtgatcttcggagagagtgagatcccttgctacgccccggacccggccatggcagagcggcggctgggcttctatgcccgcaacggcgcccggaccgccgggtatgacacggagatgttcggcgtaccctacaagaccctgtactgggcggaggggaaagtggacgagtccgccctgatggaggagcaccgctttatctatgccagtacctttgcgccggataaattccgcagatatgtccgcatcccctttgatccaaatgggacgccgggcgagagagtatcctggcagcagtgacggaaaagagagggacagatcatgaaaattttggcctttgagtcctcctgcgacgagacagcggtggccgtggtggaggacgggcgcacggtcctgtccgatgccatcgcctcccaggcggacctccacgccctgtacggcggcgtggtgccggagatcgcctcccgcaagcatgtggaggccattgccgccctgacggaccaggctctgcggcaggcgggctgtgagaagtccgacatcgacgcggtggcagtgacctatgccccggggctcatcggcgcggtgctggtgggcctcagcttcgccaagtcggtggcctttgccctgggggtgcccctgatcccggtgcaccacatccggggccacatcgccgccaattacctggcctttccggaactggagccgcccttcctggccctggccatctccggaggcaacacaatgatcgtggacgtccgggactacacggatatggagattctgggcgccacccgggatgacgcagcaggggagtgcttcgacaaggcggcccgggtgctgggcctgccctatcccggcggcgcccccatggacgccctggcccggcagtccccgggcggggtgtacaccctgcctcacgcccatgtggacggggcagagctggacatgagcttctccggcctcaagacggcggtggtgaacctggcccaccatgctcagcaggtgggggagtctctggaccgggcagcgctggctcgggacttcgcccaggctgtcagcgatacactggtgccccgggccatggaggcggcaaagcagactggccgcactgtgctttgcgccgccggcggcgtagcggccaactccgtcatccgggaggatcttcgtcgggcctgcgaggcggcagacatccggttatacctgccgccgctgaaactctgcggcgacaacggtgccatgatcggcgcccaggggtattatgaatatctggcagggcatacggctggcatggagctgaacgcctatgctacacgggacattgcagactgaatcaggcggccgcgtcagcggccgcctgatttattggaaaatgcataacgagcttatgcaggctgcatctgtaaagccagataccttgctttttgtgaaggcgcagctcgggtggtcttcatttgccgttcacttttggaaaaacaggcaggagagacggagaagtttttgaaggcaaaacattatgtaaagtttagacgcttttttgggcggtggaaaagcgcaaaaagagaagatggtaaatttatacaatttacaaaaaaatattgaaaataaatagaaaattcgcgtgtggaaaatcatgtggaaaatgtgaataactctttgtaaaaagaaattatcaaataaattatgtaaatgctgaaaagaacggaagactgcaaaaagaagggagtcaacagaaaataatgacagaatttgtcgaagtttcttgggaaaatcacaacagaatttcctgttgtaatgggcggaattcgggggaaaagcgtaggaaataggctaatcgcctgaaaatattttgaaggaattccttcaaaatacaaaatgtaatatacaggaattgccatgcagagggtgtggcaggaaatcaaaagaatctgttgacgtcggtcaaaaaatatgataaaatatatcctgttctggatgtgcctttccaaaaacaccatgtcatgaattgataagctaatgtagctcagtcggtagagcagctgattcgtaatcagcaggtcgtgtgttcgagtcacatcattagctccaaaagaagccctgaggtccaacggccttggggcttctctttttctggaaatgttgtataacggtggtaatgtggtagcaactgtcatttagcttgtgcatctccggctggaggcggcccggatcgttgttattgatgagcgcagaacctgtgctgcctaaggcatctgcgcgcactggcggcaggccggggctggtgaacgagaaccccgaccatgtgcggcctgcatactgccagagggcctctcggagggaggatgcccctgtgagcggctggagcagagaaattcaaaacgcaaagaggagacggaagaccgtgtggcttccttcgagcgaaagagggccccggtgcggaatctgcaccggggcccatgaggttctcaatgtccgtttcgaccggaagctccacggctttgcgcgtgcttcctgccgcgctccgccgggaatccatgcaccttacttataataaattcccaatagcgccttatgaggctctgtgaatgcccccagccggatctccatgctgatctcgaaggcccggtcccaggggaagccgtatcccgtcagctccacgccgccccagccccgctcggcatactcccgggtggcggaaagggaagagatgaagttgctccgctccaggttttcgatcaccggggccacggccgctgccatgccggcctccagccgctccaggatggacacccggtcgatgtccggcatccagaagttgtcggcattgcccgacaggtcgttccggacaaagctcagaatgtcgttgcgcacgatgttcttgtagcagaagtccttcagaatgctgtccgccaaggtccggagaaatgcctgttctgtggcatctgtttgctcaccgtgctggaggaaggcataccgggccacaccatggctcagggccgtgccggtgacgatggccatatccagaaaacccgcatagctcaaaagccagccaagctctgcctgatctgtcagcgccttatggaaggcggtcccgtaggtgccgtttcccgcgtcgatgaggatggtaggcagcccggcagcccggttgtcgttcagacactggaccagtgcgttgatatacgtctcctgggctgccgggtctgccggctgggtcagcaccagcattgccagttcctcgccgccgggttccgccatcgtcaggtcgaaaaagtcgaagtgctctgccacgatggcctccagaggctggtagtcataggcgcaggcaggccggtcctcagtaccgccgaaatactggacggataccgcggcaccctcccagccccactcctccaggcagagcttcgtcaccgccttaaaggccaggtcgtccacaccggagagcagggcgtccccttggcgcagctgcgcccggagataggcgatctcgtttttctggatgctgtcctcctccgaggagtcgtcgatgccgatcaatacccggaactgcccgtccgccgtctcctccagagcttggaacatggcgtcgctaagccgcagcttccgctcccgggaggccagatagttctccacggctccctccggcagcggctcctccgcctccaccgggacgggggttccgtccgcccccagggggtagtccgccacaatgttcccgatggtcagatccgtgccctccaggtggggacggggtgccatgccgtaagtccgcagggcattgtactcgttgaggccgaacccgccgtagccggtggtggccgccagccgcatgactgtgtccagcaaccagatccggttgttctcatccgctgccagcaggtcgatcaccgccgtcagcagctccgcttccaccagtgtctctccggaggaaagcgtcaccgggttctccccagtcatagcccgggagctgaccagcccgccggagagcagctgatccagggacaggatgtaccggtcacacccggcggcctcctgcttagccacccactcgtacagtgctccccggtccccgtactgggtcccgttctcattcgggggctggccgtccagccgggtgcggtacaggtcccgctccggcatggccaactcgtagcccaaggattccgccaggtataccacccgctcggcgttgtctggccggtcatccagaggtacgtaggcgatcaccggcgcaccggcccggggggtctcctgttccacaggctccgtccgcaccggcccgcaccctgccagaagcgtacaggccagcgccgctgccaacatccgtcttctcatggtatgttctcctgtttccaaaagagcggagccatcggctccgctccatctgttctgtcctgccccacactctcgggacgggaaaaggggcaggggaaaaccttcggttttccccagttgatctgcctccggcagctcaagaatctgaaaccattttcggcaggatatgcgcctgccgaaaatacatggactcagccgccttgggcggcgtctccagtgaccgccgtggtggctcggaggggagcctgctcccctccgaattccctcacagtccgaatgctcccaggtccaacccaccggtggcctgctcgatgctcttgtccatggcctccccggcctggcgcagggcctcatttacagcggataccaccaggtcctggagcatctccacatcctccgggtccacggcctccggtttgatggtaacggccagcacttcctttttgccgttgaccttggcctctaccacgccgcctcccacgctggcggtgaactcctgggcctctacggcctcctgggccgcattcacctgctcctgcatctgctggatgcgggcctgcatctccgcctggcgctgagcgccggtcatcttcatgctgccgttggtaaatccacggcgtgcgctgtatcccataactggtctctcctttgtattacttgatctcgatattatcgaactgactgccgaatttcagcaggttctgcagattttcccggggcgtggccttggggggctctcccacctgaaagaccaggcgcaccgtcacgccgccgctggcggcttcctccatcagggcatttcgcacccggtcattgtccagacgtcccaaggtaatgtcatccggggcataaaccgtcagcaggccgccctccagaacacctgtgcacatatccagaaacacccggtacataggcggcaggcggcccttgcaaccctctgccagcgcccgccaccaactgccccccacagcggatgccgcagcaggggagggggcggcgggctgcgcctccggtacgtcgaacacccgcgctccgggctcctccggcagaggcggctcctcgggaagcggagggcgctcctcccgtgccggcggttcttcccgaggcggggcatcctccggcgcaggtgccgggggcggtacggggccggaggacagcttcaccgtgccgccgctttctgcggcggccgcccgcagaagctgcccccgttgggcactgtcttccagccgctggacccgggcctccagggccgtcaggtcccagagagggactcgtcgcacagccgcaggaggcagagctccgcatccgtgcggcggttggagctgtaatagaggtccgccgtggccctttgcagcgtagtggccaggtagatcagccgggtagcgggaatctccctgcccagcctgtccagcgtggcgctgtcatagccgccggagagcagggctgccccccctccggcgctgtacgtcgcagcagcaggtcccggaccagcgtgctgagctcacccagcaccgcgcctacatccttgccaccctggtacagctggtccagctgcagcagggcgcccttggcgtcccggctcagaataaactccatcagctgggccgtctgcaggtttcccgccaggcccagcgcctccagcacggcccggctgtccacggttccgcctacggcggcacactggtccaaaaggctcaggccgtcccgcagagcgccgtccgccagacggctcaacagctccgcgccatccgccgtcaggtcgatctgctcctgtccggccacatacagcagccgcgccgcgatgtcctgaggcgtgatgcgcttgaaggaaaaccgctggcaccgggagaggatggtggcgggcaccttgtggagctccgtagtggccagaatgaacatcaggtgctccggcggctcctccagaatcttcagcagagcattgaaggccggggtggagagcatgtggacctcgtccacgatgtacacccgcttcttcacattggccggggcgtagatggcttcgtcccgcaaggcccgcacctggtcgacaccgttgttggaggcagcgtccagctccagtacatccagaaaactgccgttttcgatgcccacgcaggaggggcactggcagcagggatcgccgtccatcgggtgctcgcagttgacggccttggccaagattttggcacaggtggtcttgccggtgccccgggtgcctgtgaagaggtacgcatgggaggtgcggccctccgccacctgcttacgcagagtctgggtgatgtgggactggccgatgacatccgaaaacgttttgggccgccatttgcggtacagggcctgatacaagaaatcacctccaagcgaaaaaagtcctccgcatgcagctgcggaaccggcgccctcgcggcacatggaacatcccgcttaatgctgctcggttccccgcctgacatgattcgcgggcatccattgcgcgagaccggctccgcagctgcatgcggaggactgtaacgttatagcttatttattttactatatcctctgcaaattggcaacaaaaaattttccgctttctgaaaaaaatagtctttacaacagagaaaattatggtataatattatctgccgttgcatgacaggaatgatggactcatagttcaacggggagggcgctgcgtttgcagccatataaaactacatcccgcagcgctggttctcttcccattcactagtctggttttccatgattttccctcaaaatcgaatatcctgaaaatccgtttttcataacttttttcgatggaaaatggccaatatgggcccatagctcagctgggagagcgtacggttcgcatccgtaaggtcgtcggttcgatcccgattgggtccaccaaatgaatgaccccacccaatttgaacaaacgcttgtcgttgttcagaacgggtggggtcattttatgcctgaactccttgcattgcaaggggttcaggcctttctgtatttcatgtcttgtgtcacctgaaaaatacaaacagggtaaaatcaaaacacaaaacgtgtaatcgacgagattcgaacccctgttatgtcagtaagttgctctcctcatttgccgttcatgaacaactcttctacctgacaaggtgttcggtttttcaatgtgcgatgtggccgctgtgtgttgtaaaactcgatataagatgcaaggcatcgtttgaaatctgtttcggaagtgtagtccttcctgtaaagctcctcctttttgagtgtagcgaagaacgattcagcaacagcgttgtcatgaggccgccctgaattggagaaagattgtaccacagcgtgctcatgtagtagctgtttgaatcgatgcgaggtgtattgagcacctcggtcactgtgaaagatgagttttgtttctgggtttctttgtgcccatgccattttgaaagtagatgtgatcaactgggtgctgttctttctggatactttgtatgcgacaattttgcgggaaaacaaatccaaaatcacacaggtgtaaagatagaactcccccagcttaaaacaagtaacatcgctgacccagatttggttgggcttgtccgcctgaaactgctgctggaggatgttccgtttcttttccggttcatgaagtttcatgtagtcctgttttgcagtgctgcggatactagctaggcccatctctctcatcagttttgccacatattctgtgctgacttgatggccatgttggacaagtattgtgcggatcttttcagcacccagcacctggcggtactcatcaaatatcttctgaatcagaatacgatattcctcccgccgcttttcgaaccaagcgttgctccgtttatttcggagaatgtggttatagaaagtcccgcggggaacattcagagcttcacaaagtgtatggacatcatattggccgtacagtaattctagctccgtcagtcgctccttcaacggagcatggacggtgcagccgacggtttgcaaaacggcgaccatgttttccaatttagagactttgtgtagaagtgcatcatactctttgacggtgcaggtgcgtctttcatcgggaaccgctgggcagtatagttttgcccagcgatagatcgtccgtacgcagacactgtattctgcgcataattcctggattggcttgccctgcctgtactgtgcgatgatatcggttttctcttgatctgtgtaggtcatgatgtttgcccctttcttgtaatatgctactagtgtagcatgtagaaaaagattaacacgaagagaggccgcctgccctgctaacaatacttgagcctggtattgacaaaggaattattataatcagtctattttataaaaagcaaacttcaagaactggtcaaggaattggactgactgctttggtgtcagggagtgaagttgtgaacctgcaaatcaaggatatcatcaatgaaatacgccctgttgtgataaataaaaagcgtacagaactggatgcccggcacgatataggccgagaaaacaaagtcacggaaatcatggaactcatttctacaaaaaatatcgaccttatggagtatttggaatccatgttatatagggtgattcagcgagtaagcatgctctccaaagaaaaattttcatccgattcgtctgtagttttgaaatcacccatctccttactaagaagcaggcacagaaaaatgtggacagcttgggtgctgcctgtgtctctctgtgcctgcttttttgttgagaagtggaaaaattgtgatataatataaaaataaaagaacattagattggcatgagctgaaaatgaatgcgagatgagaatatgtcatacactgtaaaatcatctgaaagattaaggaaatctggttcagaggcagaaaccaaggcattgctttatttaatgaatttcagacccgatagtgatgacatatactactttgttgtagatttctttaatgacttaactgggatggacaacatggcatccagattgtgggatgtgcaatcaaaaggcgcacatcatgttagtcccaaagctatcgggaaagaacttgtcacattgttcaagaattatatgagcccattaacctttgaggcatatattctatttattggcagtgtgaccggatctcttcgcaaagattcttctcttacaacttttgggattgaaaatgtaaaggatgcagcgatagaacagattaagttaggcttacatgaagaaggttccgcaaaagaatatattgatagcaccgacttgaccgatgagaacattaatggtttcctgagaaaagtgttttttgtcattgatgatggtaaaaaaccaagtgaatatgtaaaagcaattataaggcaacatccgaatattattccagaagaaaaaatacttaacgctatttttaatgagataagagataaacaggcaagcaaaaaaaatatttcttcagtcgaggggattgtgattgaaacgactgatgaagcgttaaactattgcaggcacttaactaataatgaaattcgtttaatgactttacagcgtattatcaatagagatccgctgggtcaaggaataccaccatcttttgtaagtatctataatacttggccaccagaaaggcagagggaaatgctcgaagattgccaaggtgccttatgtagggcattattcaataaaaatgcggcagatggtttttggtatctatttgagaatacatatcaactgattgtcgaacatccagatgactctgtgcagtctctatttacaaaaattcaggcaatacctaattgtattgttcggtgtcctgactttgacgccctatcacttaagtactttatctctgtagtcaaggatggtgttcaacaatgaagatacggaaagtagctgtaggaaatgctgctgaagcatttattgaaggaaatttcacaaatggtgtgaacatcatttcgagcgacgataataataagggaaagacgattgtaatccaatcaatgatgtatgctttaggaaatgaaccaacattccctacatcatttgaatttcagaagtattattactatatcgaatttgaagaagctgggattatattcaaactttgccgatctggcgatggatttgtattaaagcgtgaatctactgtacttatttttgataatgtttctgaacttaaaagatattggaacaggaatatatttccacttccgtcaatagcaaaaaatcaacttttaaggattgtagatccagtactatatgtccagcttttctttattggacaagataagaaggacacgtccaatatcgccaatcacggcttctataataaacaagattttatcgatatgctttacgcatatgctggtttaattggagagcaacttccacaagagaggattgatgagataaagagtcatataataactctttctgacgagaaaaagctattgctacaacaacataaaatacttaaatcgaaaaaaacacctgtttcatatcttagcgcggagagtgaccgcctcgcatttggtaaaaaaatagagagtcttgaaagagtccaaaataaaattgcggaattacggaaggctcgtaatagtgtatctactcgtaagagtaaatgggagcatacgattaacgaacttcgctctttaaatcgcacaatatcgtgtggagaattacgatgcatggattgcaactctacaaatatctcgtttagtactggagagtcagttcaaacatcctactcgtttgatgtgtctacagttgaaatgcgaaatgaaatcattcattctatttcagaaaaaatttctgcttatagcgaagaaattgaacggctttctgcagaaataattatagagcaagaacgtttgcaatctttaatggatgatgaaagcgtctctcttgaatctattgtcgcttacaagaaagatattttttcggcttcagatgcagaagccagaattaaagagatagacatggaagtcgctacattaaagagtcaactgttagccagtgaaaatgcatcgattgaaacgcaagagcaaagagtagctttgttatcagcaattataggcaaaatgaatgaactttaccatcagattgatccggatggtaatataatatattcaagcttatttactcagcgaaatgaggtgtattctggaagcgaggcgactatttttcatgtggtgaaattgtttgccttacaatttgtgttgcggcacagtttcccaatagtaattgactccttccgagcagaagacttatcgactggaaaagaaaatacggtgcttgaaatctcaaaatcaattgataagcaagtaatactgacaacaacattaaagcatgaagagataggaaaatatgacgaccttccagatgtgaatcatataaattatcaatctcatactccaagcaagatccttgatggtgcttttgtagaatcctttgttgcattgttgaatgacctttcgattgagatttaaatggggtataaaaagtattgactcactatattagatcgccccttgcgctagcttttcatatcatattatttttgggggaaaaggtgactacgcctcacttccacaccggccccgctacgctaggccctagtttggagttggtgcagactgcatctttttgtctacacattccattgtagacaaagcctgcgtttaacgatagttatacgcaggttttgtttttacttggcgatatagcacaaaatggcgagatacaaattagttataattacatatcacatgtgtcaacaagcaggtttaaggaaaaggtatcttccttaaacctgcttttatttatgttttaaaaagtgaggcaactatgaaacttccatatggctatgttttgattggcaaggaaatcgttattcatgaagaaaaggcggatgttgtccgtagcatttttgatgattaccttgccggagccagcttaggcaagattgttgatctgcttttcaaaaaaggggtggtttctccaactggaaaagtaaaatggacgagggcggccgtggataaacttctggcgaacaaaaaatatatccccctggttggtattaagatatacatggatactcagtttgagaaagctcgacgttgcaatgtagactatgataaagccgggtatccacgaaaggcagtcaggtatcagtctccagtttttgatacaaaatgagactatacagaacccatttctcttgttatactaaataaaaaggagaatgggccatgaacgagaatgaactacatgagcgatacatacgcttggcatttcaatatgagtctgccattgatgcccttctgacaaaaggattggtcgatatagaagcggccgacgccgcaaaagagagattctatgatacattgaatgaggaaaagctgcggaccacacaaaaaatcagggactatcatgagaccatcagcctgtatatgaggatgctggcctatgatggcatggtctccctgacagaattggcaaggcagtattccgatgagtcgccgggatatgtaatccaaagctggatgcgcagccgcaacacattagagtttctccgccaatgggaaaatgacatgaatgaaggttttgatgatagggcctgtgaggaactgattcatcagggacatacgacatcactgaccattacaccatctctgtggattcgaaagactcacgctgttgggatacaggtaaagcaaggtaaaggtggaggcgtgagtgcttaccctgaaattgctgcaggcttccagctatggatagatccgaaggttcggttggcaatcgttaggaaacatatgtaaaacagaaattgattaaagtgcatgagtggatggagaatggtatgtttcgtatcaaaccagtttactccttccacctgcttatgagtatgggtacgatttgcttcttttccacaatgcacttttcttaagcagtgagtattcgattgcccggtatgcatatccgcaggattactgaggcgtgaaatatgggtaatatctctgaattagaacggcgtatttccattcgcattatactggaagacgctgagataattttcgcgctactatcaagtgaacaagatattagagtatcacataaaaggaacgtctcaaatactaaaagctgatacattacttatttgttaattatggagggagcagctgctccatctaccaatgtgaaagaaatcattacaaaacgattttaaacaactaaatttggaaatctcagtatgtgccagagtttgacagatagtttagtggagtggtgttgaatatgagatttgaagtagttcaacgaggacaaatcgaacgtgtttttacaaaaaatgtgatatacctccacaaagacggttggaatgactggtttaaatatgagacgatgttttatctttcctattctgatgaaaaagggaatacagtggagttggggagcattaagatcggtcagataggaatggagcagaggacccctgatttgccgaaaacttttgaaacgttaaccgattcgttttttacactggggcaaagtgaagattattatgaaaatgtcaaaaaactggaacacggagaactacgagaggatattttaactgcgttaagagatattgcgtataatctgacaatttttgaggcagtgaaacaggaaaatgtcacgcgtgaatctcttatgcgcgatcttggctccagaatcatcagggaacaatttcatcgaatcgctaacgggggcgcgaaattgaccccttttgatatatcctacaagctcccaggtcaggtcggaaccgattaccaactggagtttcatgtagtcccggattccaacccaccgactaacatccatgtattgattgggagaaacggcgtcggaaagacccatatgcttacgtcaatgatacgttgcctttcaacaggcaaccaggatgggcaatatggaaaattcagctttgagcatcgcacaaaattttcaaattttgtatgtgtagcttttagcccgtttgatacctacccaatgccggatgacatagaagaggatgaatatagtggaaaatacacatacattggtttaggcagcgggcaggagatacggatgcagcggctggaggagcagtttattgcggcgctgcggtcatgtaataaatataaagaaaagcgcacattatggattgctactatgacgctactgaactcagaccccatttttgcgaacaatggtgcctccgcgctgctgtctccacaaggaacagaggaaggtgaactggttgtctctgcgcaagagctatttagccgtctaagctctggccataaggtgattttgctgaccttgacctgtctggtagcgattacgatggaacgcactcttgtgctcatggatgagccggaaaatcatctgcacccaccgttgctctctgcatttgttcgggcgttatctgcgttgctgattcaaaaaaacggactggctattatttctacgcactcgcctgttattttgcaggaagtacctaaaaactgcatctggcagctttacagaaacaacacaatactgcgtgcggtacgaccagagcgagaaacattcggtgagaatgttggagtcctcataaacgatgtctttgggcttgaagtgacccattctggctttcatggtatgttacttcagatggttgaagcgggcttaacatacgaggaaatattaaataaattcgattttcgggtcggtatggaagcgagatcgattttgcgcatcctgcttgcaaatagagagtatggaggtaccgaatgagaaaactgaacgctcccggcgattcggttcaagatgtattttcgacgtgtattgaaagctatcgggatgccgcgttaaaaaaccggctcagatcgatagttcctgttctctctgatgaggcatcgcgctttgaagactgtgtattaacatcaaagacccatactattccaacggcggacaatgtaggcggggtggttagcaaggctgagatgttggacatttatgaatccaagtttgtaaaggggactggccggccatattacgataaatatatgtcgctccccacgaatggaaaatgtccattctgtgggattggcactgtgagcacgttggatcactatttgccgaaatccaaatatcctgcactggcaatcacacctaaaaatatgatcccggcctgtcgggactgtaatttgggaaagaaaaggacattttctcctcagaactcagaggaggaaccgttacatccgtattttgacgatgttgaacaggatatctggctgtccgtgagatttgaagttgcgggcaaagagttagttcctacctattttgtgcggaaacctgtagcgtggaacgacttgctgttcaggcgggttgagaatcatatggttttatataatctatacacatcctacgcagtgcatgccgccgaagaaattacaggccgatcgggtatatggcatgtctttctcgatagatgtggtgaagatttccttgcggcatcctttcatgacgaggcggttagcagggaacagttgttcttaaattcatggcagtccgcactttaccgcggattggaggagcatattgattttgtaacccaatggctgcgattatgaacacccccacctaatccgaacagttcccatgaaactgacggattaggtggggcgttttatgactgaaagatttatcatagcaaggttttcggccattttcatatttacgatggaaatgaaatataaaggcacaaaaagtttgaaatcagctttcaaaactgaaattttcggaatccgaacccctatgtagcatgaatacatggctcacctttaatacactttcgccatttgatatggtatccggtttttcaatatgcgatgaggttgccctgtatataggatttgatggaagagtcaatctctcttgaatcctgtttcagaggcatatcccttcgataaagttattccgttttgaacgatgcgaaaaatgatttggcgactgcattgttatgggggttacagagatagaaaatgactgtaccattgcatgctcataaagtaactgccagaaacgatggaaggcatattgtgcccctaaccattgtagaacagaagttcaagttcagaattgagttacatccttgcgcctttgaaagtggaggtgatgaactgtgtactgttcctaatgctttgaataaatttataagatttggtcaataatgaagatatggaattttggggtaaatgctttgcaactgcatcttttttgtccacacaatacaaaactagaaatcgctgcagtttttactgcggcgatttctcattggatcgccccatcagctctgccggtggggcggcccgtaaaaagagctttaatatcaaacatcgagtgaagtgagccgctaacatgaaccttccactaatagaaatctgctattagaacggtgattgcccgtttacgggctgtatggcaagtgatgcaagcggaataaatttccatgtatcttgagacgcttgccggtaataggctcttatagggcctacgcaagcctccggcttaaccggcggttatggcttgaccacagacggattttgctttgattatcggaaggattcctcgtacggggaatcctcttttgtttattgcagcgcagatcatggggccgcactcttcagcatcctgtccagtccccaatggctggaatctgctcacagacatgtgccggggcggcggactgttccagcttgacctggaagggacgtcaagccagagaagaagctttttataattccggcagtgcccagcggcggttggtggaagagtggcctgctgctttgggattcggatcgctgataacgaattttccgctcaccgatgcgcagttttcatgccgcaaagtccggaccctcccgccggaagaacaaccgtctgccttggcggctggctcttataagaaataccatacgcctcttccgccgtgcgtattgagccgtttagggcggcagagcggtttcttcccacgaaaagcggcttttgccttgcgggacatactgcgctgcaaggcggcggaaaggggttccctttgtcgggacgcgagagaacaaaacagcccccccttcggaatgcccgaaggggggctgcggatctatcagagctgcttgaccgtgtaatacaccgccagggcaaagaccactatggccagggcccacatggcgtaataggcgatggtgctgctgaacagagcgatggccagcgccacgacggacaggccgcaggccgcatagatgggcatgggatccgcgccggcagtcaacacctgaagattgcccagcttgccgccattcttgtccgccttgttggtgaggaaagccgctacgatcagtaccacgatatagactaccgcagcgatccggacataggtacccaggaagatgctgtccagcacccgccggcagacccacagggcgatcagggaggcacccaggatggtcagggaccaggagcactcccgatcgtacagattccacagaatgcccagcagcatgaccaccggaaccaccacgcacaggaaggtgagagcggagtcgtagaaggtgcggatcatccaggcggaaccgcccaggaaaacgccggcggcaaacaccgaccagccgatccagcggcgcttggtttgctggcgccagacgatgcccaggaccagaccgatcacagccactgccgcacccgcggccatcagatagggcagtgcggcgtcgcatgcgagaagctcattggcggtgccgttcacatagaagcggcggatgaccaacagatagatctccgccacgcagccggccagaaaaaacttgagcgcgttgtgcatgggctcgttccgctttaccggcttggatttactgacaggatttttggacatataggacaacctccagggtgtttgttccgaaaatagccgcgggaaaacatgcgcttccgctggcatactatgatagtatagcagatatttcgtgcctttgcaaggggaaggagccagacttttcccttttttccaacaggagtcaggattgccggttgagatttgcccgggggcgtggtatactcctctattatgagattttttgcgaaaaatactgatgacaagaggaatttgcttatgaaacgtttgggcgcactgctggcgtcactgctgctggcggggagcctgaccgcctgcggcggcactgcggcgcaggagatgcagagcatacaggtcttcgccatggacacggtgatgggcctgcgggcctgcggcggggagacggaggcggcgcttgcggcggcggaagacgagatctaccgcctggatgaggcgctctcccgcacccgggaggacagcgcagtgtcccggttgaacagcgcggcgggggggacgccggtggatgtgggggaggaactccgcgacctgattgcccgggccctggatttcagcgctgccacagacggggcctttgacatcaccctggcgccggtgtcctctgcctggggctttacggaggacacctaccgggtgccggaggacgctgaactggcgttgctgctgccctgcgtgggggcggagcatgtccacctggaggaggggactgctgtctcgctggaccagggcacccggattgacctgggagccattgccaagggtatgccagcgactggatggctgcgatttaccaggagcacggcatcacccacggcatcgtggacctgggtgggaacacctgggtctgcggcgggaacttggagggggagccctggcagatcggcattcaggacccggcccggtccgcgggggctttggcggggatcctggaggcgtcggacgcctttgccgtcacctccggcggctatcagcggtattttgaggaaaatggacagctctatcaccatatcattgatcctgccaccggccgcccggcggagagcggacttacctccgtcaccgtggtggcggatggggccgcgggcaacggcacgatgtgcgacgccctctccacggccctgttcgtcatgggggaggaccgggcgctggagctctggcgcagcggcgtctatgactttgacctgatcttggtgacagaggacggccggctgctggcgactgcgggcatcgcggaccggttccgtccggacgattcggcggggtatgcgtatgaaatcgtctcctaagctgcggccaaacggctgggatgcgttggcggcggccgctgtgctggcgctggcggtggcctgcgcggctctgttctggactgggggagaggaaataggcccgctgacggcggtagtgtctgcgaacggcgagccggtggatcgggtggtgctggcggacctgtcgggaccggaggagcggacctatacgtccaacggctacaccctccgggtggcctttgggccagagtctgcccaggtgacggtgtccgactgccccacccaggactgcgtccacatgggggagatcacccgcgggggacagagcatcgtgtgcctgcccgcccggatcgtcgtgcagctggagggcggcgcggcggcggatgacggcgtggatctggtgatcggataaggaggcgccatgaaactgacgacgagacagttgacgctgtgcgcggtgctgacggccatggcgctggcgctcagctatctggagaacttcttccccttgtccctggccatccccattccggggatcaagctgggactggccaacatcgtgacgctgttcgccctgtacgccctgggaccggggcaggcgctgctgatcctgctggcccggtgcctgctgggggcggtctttgcaggaaacatgaacgcgctgattttttccctgctggggggcgtgacggccatgggggtgatgatcgccctctcccggctgaagcgcctctccgtctacggagtgtctgtgggcggagcagcggcccacaactgcggccaggtggccgcagctgtgctgacgctgggcaacacggcgccgctgtactacctgccggtgctgctgggggtgtccctctttaccggggcattgacggggctgatcgccgcctgcctgttccgggcgctggcacatacaagactgtggggggtgtgagcggatggacaagcgggatcagagcaaaaaggacgagatcatcctgcggcagctggaggtgatccgctctatgacggagcacaacctcagccgcatgggcgcggacttctggggcactccgacaccggagaagcatgtgcctgtggctccgctgccggagaaagaaaaaaggatcccgccggcagacggcggggagaaaaaggcgccagaggcggcagaacagaaacaggaagacaccgccaaagctccccccaaagagaacatcgaggatctgcagaaggagctggacagctatgtgggcctcagtgcggtgaagcgggaggtgaaagacctcatcaatctggcggcggtggagcgtctgcgccggcagcacggcctgcccacagcggacatgagtctccacatggtgttttccggcaatcccggcacgggaaagaccaccatcgcccggctgatggcacgggtttaccacagcctgggcatcttgtccaaggggcagctggtggaggtagaccgcagcgggctggtggcgggctacgtgggacagacagccatcaagacccggaaggtcatcgactccgctctggggggtgtgctgttcatcgacgaggcatacgccctcaacggcggcggggccaacgacttcggccaggaggccatcgacacgctgctgaaggccatggaggaccaccgggacgacctggtggtgatcgtcgcgggctacgacgggctgatggacgagttcatccactccaatccgggactggagtccaggttcaaccgcttcctccactttgcagattacacggcggaggaactgctggccatcttccggatgcagtgtgaaaaagggtgctacattctggagccggaggcggaggcgccgctgcgctccctgctggaaaggcggatggcggatgcggcctccttcggcaacgcccggggcgtgcgaaacctgtttgagcagatcctggtccggcaggcgggccgtctggcgggacaggcgtccgtcaaccgggaggacctgacgcggatcaccgccgcagatgtggaggcagtgggccgggcaaatgatttggaggcgaaagagcgttgaaggttttgatcttacatcccagcagccgatatgaccggtatctgcccgatattcccgctgcggggcggatggagctggtgttcacggaccgggaggggccggaggagcgctggctggcagccggcggcgatgcggaggctttggtggccgcaccggtgacgccggtgacagaggaactgatcgcccggatgccgcatctcaagctgatccacagcgacggggtgggctacgaccggattgacctggcggcggcccgggaggggggcatctatgtgtgcaactgcgccgggtgcaacgcaggccccgtggcggagctggcggtgacgctgatgagcatgctgctgcaccggacgctgtggggagaccggatggtgcgggccgggcagcagcatgaggcggtgaacgagctggcagcccatgtgccggaagatctgtccacctgccgggtggggctggtgggcttcggcgccatcggccaggctacggcgcagcggctgcgggccaacggcagcgaggtgttttactacgcccggcaccggcaggatccggctgtggaggaggcgtacggcgcccggtatctgcccctgtacgagctggcggagacctgtgacatcatcagcctccatctgcccgccacgccggagagcacccacctgctggaccgggcgttcttcggccggatgcggccggggagctatctggtgaacaccgctcggggcgcggtgatcgacgatgcggccctgtgcgaggctatccgctccggccgtctggcgggggcggcgctggacgcctatgacccggagcctgtgacggcggagcacccgctggtgcggctggcggcggagtgcccggaccggctgatcctctgccccaccagggcgggatcagccatgcggcgttccgggaggccgcgcggatggtgtttgcggatctggaaaagctgatggacggcaagcgtccggaacgggtggtcaacggcctgtaactggcgctgatggagattaagaggccggaagaggagaggcactatgcgcgtaccagagcactgcacagcggatgcggggatgttcttcgacggccatccggcggagctggcgctgtatgaagcgctgttccggcggatggacggggcgtttccggagggaaccgtcaaggtgcagaaaagccagatcagcttttacggccggcatctgttcgctgcggcatctctgccggtgcggcggcggaaggactggccgaagatgtgcctgatggtgaccgttggactgccgtaccggctggactcgccccgggtggtggcggcctcggagccgtatcccggccgctggacccaccatgtcttggtgacagaggcggaccagatcgacgaagagctgatgggctggctgcgggaggcatgggactttgcggagagcaagcgatgagatacacacgggaagagctggcggaggcccggcgatccatcgactccaccctgcgcaagtgtgagaaggcgctggagaagctgcgaccgggcacgtcgccccacacgctgacggtacggcgcatccgggcgttccggatcgccttggcgctgatcgaccgggagatggacgggacggagattcccggtccggaagggaaggaggacctatgagccactatgcctacggatactgcgggatgccctgcgccctctgtacccgctgccggacagagggaagcagccggtgtcccggctgctcctgcgacggatactacaccgtgccctgcaaggtccaccgctgcgtccgggaaaagggactggaccactgcggacagtgcggggacttcccctgcccgaagctggggaagatgggggatttccgggacctggatacgggccgcgtgaaggagcggacctgccgggccgtggcggcggagggcctgcccgcctggctggcggagtatgaggaaaaggcggacctgctgacggtggcgctggagcggtacaacaacggcaggatgaagcggtatctctgcgagctgttcctgcagcaggacctggacaccctgcggcggatcatggcccgggcggaggcattggaaggagcggattccaaggagctgggccgggccttccaggcgctggtgggggagatgctggaatcgtgagcggggcgctgaacagaaaaaaagccaccggagcaaatgctccggtggctttgatgttcgcttattccagctcgaaggcaccagtgtacagctgatagtacagtccgtgctggcggatcagatcgtcgtggtcgccccgctccacgatccggccgtggtccagcaccatgatggcgttggagttgcggacggtggagagccggtgggcgatgacgaacaccgtccggccatacatcagggagtccatgccctgctgaacgatggcctccgtccgggtgtcgatagagctggtggcctcatccaggatcatcaccggcgggtctgccacggctgcccgggcaatggccagcagctgccgctggccttgggacagattggcgccgttgccggtgagcatggtgtcgtacccctggggcaggcggcggatgaagtcgtcggcattggccagggcggcggccgcctccacctcttcatccgtggcatccagattgccgtagcggatgttctcccggacggtgccggtgaagaggttggtgtcctgcagcacgatgcccaggctgcgccgcaggtccggcttgcggatgttgttgatggagatgccgtcgtaacggatcttgccgtcggcaatgtcgtagaaccggttgatcaggttggtgatggtggtcttgccggcgccggtggcacccacgaaggccagcttctggccaggcttggcaaagaggctgatgtcgtggaggatggtcttgccctcctcataggcgaagtccacatggtcgaaccgcacgtcgccggagagcttgatgaggtagtagtcctcgctctcgacattccggaccgggcccaggatggggcggtagaaggccttgccgtgctcctggtatttccaggcccaggcctcgtcttttccagcctcgggggccttcagctccgtgaaggagccgtccgcctcttcccgcacagggaccatcaccatgtcagtgctgtgggggaccctccaggcccagaggttggtgcgcttctcggactcctccagttggtggccctctttgtcataggacacgtttaccagcgtcacagtgccgtggtcctcctccggctcctcgtccatcagggcgaagatccgctccgcgccggccagggccatgatgatggagttgaactgctgggagatctggttgatggggttggaaaagctcttggacagctgcaggaagctggcaataacgcccagggtgatggtggtgtccaccccgctgagggccagagcgccgcccaccatagccacgatcacgtactggacattgccgatgttcaccatgataggcatcaggatgctggcgtaggtgtgggctttgtccgcgctgtggaacatttcgtcgttgacccggtcaaagccgtcctgggcctcctgctcatggcagaagaccttgaccactttctgaccgttgatcatctcctcgatataaccgttgagggcgcccagggtgctctgctggcggaggaaatagcggccgctgcggccggccaggaaccgtgtcaccaccagggcgaagcagacgcacaccaggaccacaaccgtgagcagggcgttggtgaacagcatacccaggaaggtgaccaggatggtcatagaggagttgatgacctgggggatgctctgggcgaacatctgccgcagggtgtccacatcgttggtgtagacgctcatcacgtcgccgtgggcgtgggtgtcaaaatacttgataggcagggtctgcatgtggccgaacaggtcgtcccgaatggttttctgtacgccctgggacaccacgatcatgttccggttataggcgtaagcgcacagggcacccaccaggaacaggcaacccatcatcaccagggcccgcaccaggccggaaaagtctggatccgccgcacccagcaggggggtgatatagtcgtcgatcagactgcccagaaacagagagcccgccacgttggcgatagcactgaccagaatgcacaccagaacaatgatgaagcgggccttgtacccccgtttgatatagcccatcaggcggccgacaatgtgccggcgatggccgggcgccttggcgccgctgcggatctgcttactgctcattgtcactgcctcctttcatttgggattcataggtctcgcggtagatatcacaggttttcagcaattcgtcgtgggtacccatggccacgatctgtccgccgtccatcaccaggatcttgtcggcgtcctcgatggaggagacccgctgggcgatgatgaacttggtggtatccgggatctcctccagaaacgctttgcggatcagggcgtcggtcttggtgtccacggcggaggtggagtcgtccaggatcaggatcttggggtgcttcagcagggcccgggcgatgcaaagccgctgcttctgcccgccggagacgttggagccgccctgctcgatataggtgtcgtacttgtcggggaactcctggataaaggagtccgcctgggccagctggcacatccggaccatctcctcgtcagtggcgtcctttttgccccagcggagattatccttgatggtgccggagaacagcacgttcttctgcagcaccatggccacctggtcccgcagggcgtccatatcgtagtcccggacgtccgcgccgcccaccaggacgcggccctcagtggcgtcgtacagacgggggatcagctggaccagggtggtcttggaggtgccggtgccgcccaggatacctacggtctcaccggacttcaccgtgaggttcacgttcttcaggcactccttgctggggtccttggcgtaggagaagctgacgttctcaaacaccacggagccgtccttgacctcttcgatgggctgggagccgttcttcagatcgctctcctcgttcaggatctctgtgatccgctctgcggaggcccgggccatgatgatcatagtcagtaccatggagagcatcatcaggctcatcagcatcatcatgatgtagctgaacatactggtcagctggccggtggtcatgctgccgcccacgatcaggttggcgccgatccaggacacggagatcatgcaggcatacacacagatctgcatcagaggcatattgaaggccaggatgcgctccgccttggagaagtccatgtagatctcctgggagaccttgccgaacttctctacttcatggtcctcccgaacaaaggacttcaccacccggatacccagcaggttctcctgcaccacgttgttcaggtggtcatagcgcttgaagacccgttcaaaaatggggtgggccctggtcatgatgagcgccaggccgatgcccaggatcgggatgaccaccaggaagatcagtgccagcttggggttgatgcgcagggtgagtacccaggcgcagatcaacatgatgggggaccggaccgcgatacggatgaccatcataaaagccatctggacgttggtcacgtctgtggtcaggcgggtgatgatgccgctggtggagaacttgtcaatgttggcaaaggagaacttctggacattccgatacatctcccgccgcagattccgcgcgaagcccgtagaggccttggcgccgaaacggccggacagtccgccgcagatcagcgccagaacagccattcccaccacggtgaggccgtaggcggcaatatggtgcatgctgccggccttgaccccctcgtccagcagcttgccggtcatcagggggatcaacacgtcaaacgccacttcgccgatgacgaagatgggcgtcaggatggcggctggccagaactcctgaatacagctggccaggctcctttttttcttcatagaatacctccttgtgtctttgctgtgccgggggaagcgattgagccgcttcccggcggggcccggttggtcaaatgagattttgcttcagcttttccgcgatggccaggaactggtcaatctcctcctgagagatgcctctggtcagcgtcgcctctgtggcggcgatccgccgctctgcctcctgattcagcgcctgcgcccggagtgtgggcgtgatccgcttcatccgggcgtccctgactcccatagagcgctggacgaggccctcgtcctccagccgcttcagcagccgggaggcggtggagctgcggatgcagagggcgcgctccagatccttttgatagatttcccggccctggctgtggcagagataaccgatcaaaacgccctcgatctccgtcagcatgctctggggatggtcggcaggcccccaaagccgtctgcgcaggagattggacagtgccttgatctcatacccgacgtaccgctcatgctgcatggaaacacctcctccaactgaacaggattatattttagttagcaaactagcaaatgtcaagaagcaatctgccaaaatttctacgggtcttcctttaaaattcggcaggcaccgaaagagaaggaggcgccccacaccgaagggcggggcgcctctgaaaaaacgggttggaggctgctgttcagcggccgccccgggggcggtccggcaggaaacagaggcaaccggcctgacggctggcgttcaggtcgatgagccgctggttggagctgccccggaaccggagggtcaggtccttcagctcctctacgaagcggccgtccaccagcacatccaacagggagagcatctcgtctgtcacctcgcagcggggatgagtgccgtccgaggtaagctcctcataggtgaagccggagaagccccagatggtcttgtccggatacatctgccggacccgccggagaaagggcaccagggcccgctggttctccggttcaaagggctcgccccccagcagtgtcaggccgttgatgtagacaggggagagcagggagagcaaataatcctccgtctcggtggtaaagggctggccgtagcagaagtcccaggtttggggctgaaagcagttcttgcagtgattggtgcagccggagacgaacagggtaacccgcactccctcgccattggcaatgtcgcagtttttgatctcaccgtagtacatggcggtcctcctgctattcttcaaaatgggcgcccgcaggcgcccatttgagtttgatcgtttttcccggggacatgcgcctcgggaaaaacaccgctcagtttgtaagtgtgcgagcgaagcgagtgcgcgcacaaactgcaatctcttcgttcaaaaggctttgccttttgaacgaaatattttacaggtgcagcacccggtcccggatctcctgagtccggccctggttccagaactgggttccgatgtagccgcaggtccggcgggccacattcatcttgtcctggtctgtgttgccgcactgggggcacttccagatcagcttgccgttctcctccgcgatctggatctcgccgtcccagccgcacacctggcagtagtcggacttggtgttcagttcggcgtagatgatgttttcatagatgaacttcatcacctggagcaccgcctccaggttgttctgcatgtccggcacctccacgtagctgatggcgccgccgggagacagggcctggaactgggcctcaaacttcagcttgtcgaaagcgttgatatcttctgtcacatggacgtggtagctgttggtgatgtagctcttgtcagtgacgccctcgatgatgccgaagcggcgctgcaggctcttggcaaatttataggtggtggactccaaaggcgtaccgtagagggagaaatcgatatcgctctcctccttccacttcctgcaggcgtcgttcatgtactgcatcacctgcagggcgaagggggtggcggaggggtccgtatggctcttgccggtcatgtacttcacgcactcgtagaggccggcgtagcccagggagatggtggagtagccgtggtagagcagcttgtcgatggtctcgcccttcttcagccgggcgcaggcgccgtactgccacagaatcggggccacgtcggagagagtgcccttcagccgattgtgccggcacatcagggcacggtggcacagctccaggcgttcgtcaaagatcttccagaacttgtccaggtcgccgccggaggacagggccacatcgggcagattgatggtcaccacgccctgattgaagcggccgtagtacttgtgcttgccaggctcataattgccggcgtttgcgatgttgccgatgccggcatctgtgaagcggtccggcgtcaggaaggagcggcagcccatgcaggtatacacatcgcccttcagctccagcattttcttggcagagatgtagtcgggcaccatccggcgggcggtgcacttggccgccagcttggtcaggtaataatagggggaatcctcgtggacgttatcctcctccagcacatagatcagcttggggaaggcgggagtgatccacacgcccttttcgttcttcacgccctggtagcgctgctccagggtttcctcaatgatgagggccagatcctttttctcctgctcgttcttggcctcacccaggtacatgaacaccgtcacgaagggggcctggccgttggtggtcagcagggtcagcacttggtactggatggtctggacgccgcggcggacctcatcccgcagacgggtctccaccagctcctcgatcttctcccgggtgggccggatgcccagggcctccatctcctgctccaccagccggcggatcttcttccggctcacatccacgaagggggccaggtgggccagggagatagactgcccgccgtactggttggaagccacctgagcgatgatctgagtggcaatgttgcaggcggtggagaagctgtggggccgctcgatcagggtgtccgtgatgacggtgccgttctgaagcatatcctccagattcaccaggtcacagttgtgcatgtgctgggcgtagtagtccgagtcatggaagtggatgatgccctcccgatgggcctccacgatgtcggcgggcagcagcagccgctcgctcaggtcccgggagacctcgccggccatgtagtcccgctgggtggagttcaccaccgggttcttgttggagttctcctgcttggcctcctcgttgcagcactcgatgaggctgaggatcttctcgtcggtggtattgctcttgcggaccagagagcggacatagcggtaggtgatgtagttcttggccacctcataggccccgtgagccatgatctgggactccaccaggtcctgaatctcctccacagagggggagcggttcatcttctgacagctgagttccacggactccgcgatccgctggatctggaccggggtcatccgggcgtcctcctcgatagtgttgttggccttggtgatggcggcgatgatcttcgtgatgtcgaagatgacctccgtgccgttccgcttcatgactttcatgggactctccgcctctcttgtagaatcaatctcaattgtaatatatctagtaagcattgttatcataccacactagatatgggatgaaaagttgcatttaccatagtgtcttccaaaattcggcgaggaaatttgtgcgttccggagaaaagctgtcgatgcggaaaaaccgccccgtgcggcagggcgcggagcggtcgggatccggagaacagtcaggtcagctctgtgtatttggcggcgctgccccgggccttttccaccgggtacttggcggcgttctgatccaccttggcgttcaggatctcatccagatccaggccgcacacatcggccatcaggacgcagtagctcagcacatccgccagctcctcccggatgcggcccagcttgtcccggcattccaggtccgcgccgctccactggaatatctccagcagctccgccgcctccagggacagggagatggccaggtccttgggggtgtggaactgccgccactcccggtcgtcccggaactggatcacccgacggatcgtctcatcccgcagcatggatgtcaactccttttccataaaatcaggattcactccgcccggacagcccagcgcagcttggtggagtgggcccgggggttccggcggcactcctgaggggagggacgggtgacctcctgggcgatgtcgctgtaaagcccctcccggtactgctggcggaaggcctgcttcaccagccggtcctccccggagtgaaaggtgaggatggccgcccgcccgccgggcttcagcacatgggggagcttttccagaaaggcgtacagcacctcgaactcactgttcacgtcgatccgcagcgcctggaaggtccgctgacaggacttcttcaccgcctccttccgctccccggcggggaggaaagacagcgccccctcaatgagggcgtacagctggcgggtggtatccacagtgccgccccggcggaacacctgaatgacggcctttgcgatgcggtccgcgtagggctcgtcggaattttccgccagcaggttctccagctcctcctggtccagctgccgcagccgctccgccgcggtgacgccggaggaggggtccagccgcaggtccaggggaccgtcctgcttgaaggtaaagccccgggccgggtcgtcgatctgcatggaggagacgcctaaatccgccagcacgaagtcgaagagcacgccgggggccacctggtccacgtcggcgaaattccgatgctggatggtgaggagctccggcccgaagcccgcagatgccagccgggcgcgggtcttttccatctcgatggggtccacgtccgtggcatataggtgtccttgcccctggagctgtgccagcatccggcgggtgtggccgccgtagcccagcgtggcgtcgtagccggtctggcccggctggatctgaaggacctccaggatctcgtctaccagaatggggatgtgcatccctgccggggtcttgccgctctcgatgatcttttctacatcagagcggtagttctccgggtcatgctctttgtacttctcctgaaaggtgcgggggtgggtgcccttgtaccgggggcggcgcttgtgctcctgctccatgggatcaactccttctctgaaccgctatcatatcacagccgcagccaaaagaaaagtcccgccgcattgacagagcggcggggaccggatacaatagacattcagcaaggaggcagatttttatggtaactttggcacagcgcattgaggagctgcggaccgccaggggcctgagccgtccggctcttgccgccgccctgggcttcccccgcacggcgattgaaaagtttgagacgggccgccagacccccacccaggaccagcagaacaagctggcgtcctacttcggcgtgtccctcttctatctccggggagagaccaacgacaccacccagatgtccgactggatggacggggcgtttctggacgagcccgccccggttccggcccccaggcgggcggcagtgaagccggcggtggcggcgtcctccggcggggagggcggcaccatgttcgacgcgttcctcaccagcaagaaattccaggaggcactgcgcaccgcggtgctggatactctccgcacgccggagggccaggagctcctgaccaaggccatccggaaagagctggcgaatcggcagaagtgatgtgcggcggcgaaaggggcgggggatcgtgatctcccatcctgtgtgtgctccgggtgtatgggggaggcgaaatgcggccggagggaaaatccgcggaacgtttgccaacatccgctgcgcataataccatacagaaatcaggagggaactgacggatacagactggggggcaggctcagatgaagaatgttctgtatataatcaaagtggtggcactggcctgtgcggccggagtgattatgacgatcctgggggcttttccgcctctgtcgttcctgtataactggcttgtgggccacggcctgcaaaatgtatgggttggactgatggccggtgtcatcgccatctgcgtgtccctgtacaatatgcaccacgcgaaaaagaaacggaagtgagcgatttgcgctcagtccggctgagaggcttggatgctctgaccaatcaaaagagccgcgggagtttgatcccgcggctcttcttgcgcgtttacaggctcttgatgaacttctcgatccggtccaatccctctttcaggtccgcgtcggagtagcagtagctcaggcgcatgaacccctcggtgccgaagtggatgccggggatgacgcccaccaggccctccttcagcatccgggtgcagaaggtgttggagtccatgccgaacttccggatgtccacaaacatgtagaaggcgccctccggcttctccgcgtccaggcccatgtccaccaggcgctggtagacgtagtcccggcgcctgcggaagatctccaccacatcgctggtgtccgtctccagggccgtgacgcaggcccgctggacaaaggagggcacggaggtgacacagtactggtggaacacctggatccggtccatcagcttggcgtccgccatgcagtagcccaggcgccagccggtcatggcataaggcttggagaagctctggaccacaatgatccggtcccgcatgtcctggtactcagcaaagctgtggtagtcctcacagtaggtcagagtgcggtacacatcgtcgcacaggacaaagatgggcttgtcccggaggatggcgtggacggcgtccagggtctccttggtgtagacgcagccggtgggattgttgggggaggtcaggatgatggccttggtcctgtcggtgatggcggccttcagctcctccggcacgatctggaagtggttgtgctctgtgggcagggagacgggcacaccgccctgcagctggaccagcgcctcatacaggccgaaggcaggggtggggatgatgacctcgtcccctgggttcaggatggtggagaaggaggcgaacagcgcctccgtggcgcccaccgtcaggatgatctcactgggggcgtagtggaggccatgggcctcggcctcgaatttggagatggcctccagcgcgtagggatagccgttgccgggggatagtgggtatcgttggcgtccagagcggccttggcggcctccttgatgacgtcgggggtgttcagatccggctcgccgatggtcagggcgcaggcgccgggggtatcccgcaccagataggtgaactgccggatgccggacagctccacgcccataacggcattgttcagagtcaggtccatggattttcacgctcctttttgttcatgaaattcagtatatccggataaaaaagggatgtcaacggcagtttccacaaaaagggaggcaccgaaaagaaagcggccccgccgcaatctgcggcggggcctgctgggagactgcattttcaggtgggctgattggaagaggcagcatcttctgccggctggcccgtttcggcgggggcatcagctggcgcctcctccggggtgaaggtcacgggggtctctccggcccgggcgacggaggtgccggagagaatgccgccgccctcccctgcggtgtaggcgatagtcacctgatccccggcattcaggatcaccgccagggggttctccgcggcgttgacggcgtagaaggtgtcctgtccctccagccgcaggaagtagtaggaattgccgtccagcacagcggtgcggatctcagcgatggcgccgctgatctcctcctggtcagagggaacagcctccgcatccccgtcggagatgaggccgctgtcggccagtgcccggcggtaattggcctcgcactccgctacggtgctgccggtctctacaatgttgtactgctggacgttcaccatggcgtacatcttcaccagaccgtcttcacccttgagggacatgaagtaggtgggctggtcggcgatgttcagcagcaacgggaaggtggccacgtaacgcatctgctggacctgactcatggcgctggcctgcgcggacgcctctgtggcgccggcgacagaatagaagtgcgtctccttggtccgctggttggagaggatgaatccgatgttggactggtcggatgtcacagaggtgacaccggtatacatatacacgtcatccccgatggcaatataattgtagccttctgtggtgtgcgtcacatcccgctggccgaaaatggagttgataaagccgttgtggtacattccgtaataatcgtactgctccataatcagattcgcgtcatagacgtggtccacccagttggggacctcctcataatactggctctccccggtaacggcgttcaccagaacggccccctggatgtccgtgccgccgaagaggccgatggtcttcaccatgcgggggcagacccagtagggctcgccctcttcattgatctcaaacaccggatcggcaaacatatatgtgggatagtggaaccgcaggtggcggggcagataccgcccgaaatgctcggcggtggtatatttcatcccctcgtccaggcggaccacttccgcctcctgggtcaccatgtcgataatcagataagcgggcaggcccgcggagcggttggtgaaccacttgaccagatctccataggccagggaagtcacgcgcaccgggcgaccctggtagttgatctgggtgtaggagggcaggatctcaaactgggagaccatatccgccagttcgcccagtttgcggctgcccaggcgcgcggcggagtcttcgtccagcatggggatctgattgtaggagatctcctccacctcggaagcaaaatcaccatctttgatggaaagcagcttgctgtagcttccggcccggattaccacccaagaggtaaggccgccgatgatgatggcggcgatcagagccaccaggaccaggaaggggatggtgcactgctttttcacaaagccgaagtaccccttcacgccctccccctgaaagccggaggtgagcacggcgcacacgcagtacaccgcgcacagcaggaacacgaagacatagaactcctccgcgtggaagttcagggcgggcagctcgaagtaaaagtaccccaggccgaacagcagcgtcacgcccagattgatgagcgtccgcgtgaaggcgttgccaatggccttgcggggcttccgctcccgcttgggacgctggggctgggaggcgtccccgccgctgaaaccgccgaaagcactggggtcaaagcctccgaagtcaaatgaaaatggcataaaaacccaattcctcctttttcagatgggccgaattgaaacccatgatacaggaaaagtgtgaacaaatcaaggtttcccgtcagaacaccattccgattccgaaaagattatggtaaaatcaaaacaacatgtaagctctgtgcggaaactgcgtgtagagaagtggagaggagggacggcattggaggatgcccggatcgtggagctgtactgggagcgggacgaggcggccattgcggagagcagcgccaagtacggcggctactgctaccagatcgccttccgcatcctggccctgcgggaggacgcggaggagtgcgtgggagacacctggctgcgggcctgggaggccatgccgcccagccgccccggcaggctggatacgttcctggggaagatcacccggaacctgtccctggaccgctggcgggccctgcgggcccagaagcggtggcagggacaggcggaactggcgctgacggagctgggggactgcctgcccgcctccggcggcgtggaacaggaggtggaggccgccgccctggcggagagcctgaaccgctttttggaatccctgccccaggagaaacgggtgctgtttgtccgtcggtactggtatctctgctccgtggaggagctggccgcctggagcggcaggcggcgggggacggtctccgcggcgctgttccgcctgcggcaggacctgcaggaacacttggagagggagggattcaccctatgacaagggaacagctgctggatgctgtgggagatatccgggatgcgttcatccgggaggccgcgccgccgcccgcctcgtaccgcaagcagcgggaattcccctggaccggcgcggtggcggcctgcctggcgctgatgatcgtgggctccacattcttcctgtcacagatgaacatgggggacggagccactggaagcggcggcgcctctgccgtcacggaggacacggcggaggtcggtgagtccggcggaacggtgaacggtgcagcagacggcacagacgattctgagccggagacagcggcgatcactgtcacggtggatggcacggtgtatgtgcaggcaggcggcgtgggccgccatccagaggcgtgcccggagggattctcctacgctggagaggcggagctgccggacaccggggagctttgtccctactatgccgacccggagcggccggggcagatctatgtctatcagagctgctgggatgaggggaccggaaccacctatatggcctatgtccgctacgaggcggagacaacaaactgaccgcgggcggaaagagaaagcagggccgccggaggggatcccctccggcggccttttgcgtatgagcctgtcctcacggcagcatcagcagctttttcaaaaattccacgcccctgggcagaacggcctcgtcatcaaaggtgaagtccggggcgtgaagctggggggtatccccggtgcccaggaagaagaacagccccggcacatactgctggtagaaggagaagtcctccgccgccagcaccggcttttccatgagggtcggcgcgttatcgcccagctgggcggcgatcttctgatagagctcttcgtggttccacacggcggggtaaccctcgctgaggtggacgtccaggctgcagccggtctccgctgccacggaccggccgatgtccttcagctgctgacggcagaaacggaaggtgtcctcccggtaggtgcgcaggctcccctccagcacggtgcggccgctgatggcgttccggactgtgccggagaccatcttgccgaaccgcagcacccggggctggtccgggggcagctgttccatcatgtcataggcccgctggaggtaggagatgcccgccgtcagggcgtccagccctcgtccgcccgggacatgtggacgctgcggccttctacggtgacggtgacctcgttggaccgtgccatcagcgggccggggcgggaggcgatggtcccggcctccaggccgggccacaggtgcaggccgaagatccggcggacccggtagcgctccagcacgccgctctcacacagctttccggcgccgccggtggtctcctccgacggctggaagaggaagagcacgttccggggcagctcggccagatgctccgccgcatactccgccagggtcaggaccatggcggtgtgggcatcgtggccgcaggcatgcatccgcccgggatggacagaggcgtagggcaggtccgtggcctccgtcaccggaagcgcgtccagctccgcccgaaatgccacggcatcgctcttccctgcgtcgaaccaggcgcagacgctgccggtgatgggagagaacacccggcagggcagcggggccaaaatgcgctggaccagctgaaccgtctccggcagctggttatccagctccgggatgcggtgcagggcacggcggtaatcgacggcggacatggacaggacctccccttctgagatgacattaataatcatatcataccacagacacggtcgggtgaccagaggaaccgggatttttcgtcccttttgacaaggaaacgggactgccagacgcgcttttttccgttttttcccttgccaaaagggagaatgtaatggtatgataccagaaaatgagatagaggcgcggatgcgacgagaccatgggagccgacgggcgaggatcgtgggggaggcaagtccgccgaactccctggtcaggtatgggcagggggtgggtccgtggggaatacccacgggactgtccgcggaattttccgcgggggcgctatccgcttacagggaactccgctttttgcatgggtgcagaggtgtgaaagagctgtcggtaggggcgtgtctctaccgacttttttgttgcttcaaccaacggacaaaaagaaagacggaggacactcacatgaaatttgaacatctgcaaggttccattgtcgccatggtcaccccgttccgccaggacggcagcgtcaacttcgatatgctgacagagctgctggagcggcagatcgccgccggtaccgacggcatcctgaccctgggcaccaccggcgaatactccacgatgagccatgaggaggatgccgctgtggtggagcacaccatccgggtggtggacggccgggtgccggtgatggtgggcagcggctccaactgcactgtcacccagatcgagaagagccggctgtaccagtccatgggggcggatgccctgctgctgatctccccctactacaacaaggctaacgcggaggggatgtaccgccacttcgccgagacggcggacgcggtggacattccctgcatcctctataatgtgccgggccgtacaggctgctccatcccggtttccgtggtggaacggctggcccggcaccccaacatcgccggcatcaaagaagccagcggcgatatgtcctacgccatgaagatcgctcgctgcgtgggaccggatttcgccctgtactccggcaacgacgacatcactgtgcccatcctcagcatcggcggcagcggcgtcatctccgtctacgccaacgtgatgcccgccatgtgccgccagatcgtggcggactggctggacgggaaccatgcccgggccctggagaaccacctgcggtacctgcagttgatgaacgacctgttcctggaggtgaaccccatcccggtgaaggccgccatgaatatgatggggctggacgtgggtcccatgcggctgcccctgtgcgagatgggggaggccaacgccgccacactccgccggacgctggaggaggcgggactgctgtgaggatcattttgatcggccggggcaaaatggggacgctgatccgggagaccgctgcggccgccggggatgagattgaggccgtcttcggccgggacgatctgggccagctgggcagactggggcgtgtagcggacgtggtgatggatttttcccgcccggaggctctgccggaggtcgcctcctatgtccgccggacggggacgccactcctctctggaaccaccgggtatacggaggcggagaaggggagtctctttgccctgggctctgcggccccggtgctgtggagcgccaactactccctgggggtggcggtgctggcccgggccctgcaggtcatcgccccggtgctggggccggattttgacatcgagatcaccgagacccaccacagccagaaggcggacgcccccagcggcaccgcaaagctgctgctggaagctgtcgatccccagcaccgcctgcggccggtgtatggccgggaggggaactgcggccgccgggagaaggatgaggtaggcatccacgcactccggggcggcaccgtggccgggacccacacggtccatttctttgggccggatgaggaactggagctgacccaccgggctgccagccgccagatctttgtgaacggggccctgcacatcgcccggctgctgcctgggcggcccaaaggggtctatgacctgcaaaaaatcttgtttggagcgtgatggctttgaatgcacaggaaatcatcaactatatcgcagattcccccaagaagaccccagtaaagatttacgtcaacctgtcggctccggtggacttcggatccgctgaagtgttcggtgagggaaagagccgcatcgtctttggggactgggccgagctggcgcccatcctggaggacaaccgggagaagatcaccgactgcgtggtggagaacgaccgccggaactccggcgtgcccctgctggacctgaaagatctcaaggcccggatcgaacccggggccatcattcgggagaaggtggagatcggcgagggtgccgtcatcatgatgggggccatcctcaatatcggtgctgtggtgggcaaacgcaccatgatcgacatgggggctgtcctgggcggacgggccacggtgggagacgactgccacatcggcgccggagccgtgctggccggggtggtggagcccgcctccgccaccccggtagtggtggaggacggcgtcctggtgggcgccaacgccgtggtgatcgagggggtgcggatcggcgccggggctgtggtggccgcgggcgctgttgtgacggagaacgtccctcccaacgcggtggtggccggaacccccgccaggatcatcaagatgaaggacgcccggacggagggaaagaccgccctggtggacgccttgcggagcctgtgaactggagaagaagcggccctgcggcgttgtgccgcagggtcccttttatcagaacgtcaaaatttaagacaaaaatttggcggcaatcgtttgcggtttcgattgcctggggcggcgccttgtgatattgtaatagcaacaatcgaacaggggggctggacatgctggtattggacttcatcaacgtgggcaacggcgactccatcctggtccgggagatggagggggaacggctgcgtttttccatgctggtggactgcggccacgacagcctggagcgggacgaccacccgccggtggaggacccccgctcctgccggatctttgccggggatttcctgcgaagtcaaggtgtggcgcatctggatatcctgctggtcacccacttccaccgggaccacatcggtggtctgggccgggtgctggagaccgtcactgtgggcgagctgctgaccccctatgcgccccccgccgattccggccctctggacccggacggagacaacggcctgcccaaggcagcgcggaacgtgctgcggtgtatggacctgtacgccggccccctgcggcggtacggagaccggatcggccggatcaaggagctgccgggggaccgggtggagtgtctccggctgacggacgacctcaccatggacatcctgttcggcgagcccgccctgtacccccggcagagagcggtgtacgacgccgccttccggggggagcggaacggctatgacctgattcactggggaaagtccatgaacgtctccagcctgcgccagcggctgtactaccatgggaaggagatcgttctggggggcgacgcctacgcccacatgtgggagacgcagaccgccaccccctgcgacatcctgaaggtgccccaccatgcctccctgtcctccaccacccggaagctgctgcggctgctccagccgaaagccgccgtggtctgcgtggccgccggacgtccggacgagcggccccatccttatatcgtctccctgctgaaggaatttacggaagatgtccatttcaccgatgcggtggagatccccggcctggtggagccggtgttccacacgtccgtccatatagagctgccatgaggagttctctgataaaaaagagaccgccccagccgccgttttcaaaacggcggctggggcggtgcggcttcagggggaagcagattactgcacgccctcccggttcagcagctccaggattctggcgtcatcttccaccgtggcgctgggcatggggaaggtgcccgcactggtggcggcgatgccccgcaggcggcaggcctccttgatgacgggcaggaaggggctgcggatggcatacaggtccatcagatggtcgatggtctgctggcctctggcgatgccggccaggtcgttctcccggaaggcgcggacccaggcggcgcagatctccggcaccacgttgctgagggcgccgatgcagccgttgccgccggagagtacattgtgggcgaagttgtcgtcaaagccggagtagatctcgaactgggggatctgggacttgacgaccttgatgagctcccgggtgtggtccatgccgggaacggtgtctttcatgcccacgatgttggggtgcatcttggccaaagccagcaccgtctcaggcgggatcgtgtagccggtgttgtcagggaagttgtagatgtagatatcgccgtgaatttgctcggccaggcggtcatagtattgcagcagagcggaggggccgaagtggaagtagtagggcggcaggatcataacggcgtcggctcctgcgtccaggcagaagttggaaaagctgatgatctcgtccgctaccatgtggctggtgccgatgatcagcttcacccggtggtcgatcttctcgatggcgaatttggccatctcccggcgctggttcatgggcatggcgaaaaactcgctgctgctgccctccaccaggatgccgtctacgccctggtcgatgagattgttgaacagacgctcctggctggccaggtccagcgtgccatcctcgttgaagagtgtgatggccggcgtcagatatgctgcgttcatagaaaagtcctccttcatacggccccgggaccgctggctccaaacccgcggggtgagattttgaaaacgcacgggcggggcgcgaaaaacaggctttagtataacaaaacggcgctgaatgtcaagagaagatctggtaaaatcccgccggttggaaaacagggcggcggcgcatgcccgcttgtcaaacgaagcggcatctgatatgatcggcctggagaaatcaatcggcggcggagagcgccggcgtggaaggagcacgatatgacacagggacagcatcgggccacagcccgggttttggatattctggagagcctgtccggctcagaggagggcttgacgctgacagaattgtcacaggccctggatgccccgaagagcagcctgtttcccatcgtacatacgctggaggagcggcgatacctccggcaggacgatgggacgggccggtatactatgggtccccgggcgctggtgctgggagcggccttctcggcggaccgggggctggcacccattacccaggtgatgaaggaggtggcttccaaatgccaggagacatgccagatgggcattctggaccaagacagggtgctgtatgtggcgcgggaggattctccccagcccatccggctgatttcctgggtggggacccgcctgccggccaacgccactgccgtcggtaaggctctgctcagcggcctgacgaacgaggaggtgcgggcgctgtatgccgggggcctgccccggctgacagagcagaccatcacggatgtggagaccctgctggcccagttggaggcggtccggcgcggggaactggctatggagcgggaggaatccacggaccagctggcctgctgggccgcgccgctgcggcggaagggaacggtgttcgcggctctcagcatctccgtaccgctgttccgctgccgggaagagaagatcgagctggtccgccgcagtctcctgactgcccaggcggagatcgaaaagctggccgaaacgcgaaactttggcttgtctgagaattgacaaactgggaacggcatgatataatgcgaccgaaaattccaaaataagaactgagttcgacataaggaacagaaaagggcgccgcgctgacaagagtctgtcttggtgtcccccttgcacggagatctgtgtgcggtcccagagccgtccggcggctgggacaggatccgtggccagagtccctgacaacggggcttttttaagataaatccctttggtgtgacggcccgcatgatcggccgctcatgcggggaatgctcgcaaatggccaggggagaggccctctgcccccccagcaaacaaattgaggaggaagaaagaccatgatcatgcgattcctgaaaaagatccccgcaggtatgatggtcgtcccgatgctgctcggcgcgattatcaataccttccttccggaggtcaccaacatcggctccttcaccaccgccgtcttcaccagtgccggcgccaacaccgccatcggtatccagctgttctgcctgggcaccacgctgcgggtccgggacatgggcggcgttgtcaagcggggcggtgtgctgctgatctccaagttcgtcatcggcgccgccatcggcattgtggtgggcaaggtgttcggccccactggtgtgctgggcctgagctctctggccatcatctccgccgtcacgaactccaacggctccatctatctggccctgatgaactcctacggtgacaccgtggaccaggcggccatgcctctgctggccatcaacgacggccccatgctgaccatgatcgctatgggcatcggcggcctggccgatatccccttcatggcccttgtggctgctatcggccccatcctggtgggtatgatcctgggcaacatcgacaaggacctgtctgacttcctggcccccgccggcaccatcctgctgccctttgtgggcttctgcctgggcgctggcatgaacctgaccaacatcgccaagggcggcgcgcagggcattctgctgggccttgtcacctgcctcatcggcggcgccttcattgtgctgtgcgaccgcttcatcagccgccgtcccggctatgccggctgggctgtggcaaccaccgcaggcaacgccgtggcagtgcccgccgttatcgccgaggcggatccctcttgggcgcagtgggcggatgtggccacctctcaggtggcggcgtctgccatcctgaccgccattctggtccccatcattacctcttggtgggccaagaagttcggctgccccaagttcccgaaagacgaggcacagaaagccctgtttgagaagcactgattcccattacacatattcgttgaggaacgaaaggagtattacattatgttgaacggcatgatcgttgagcccgtggacaacgtggtggtcgccatcgagcccgtgaagaagggcgagaccgtcacctacatgtgcgcgggcgaggagaagcgcctgactgcggcggaggacatcaccatctatcacaagctggctgcctgcgacatcgccaaaggccagcccatcgtcaagtacggcgagcacatcggcctggcggcccgggacatcaaggccggcgagcacgtgcactgccacaacctggaagagcaccgggaaaacctggacagcaagggctgagaaggaggatacgagtatgaatttctacggttacaagcgtccggacggccgcgtgggcgtccgcaacaaggtcctgatcctgcctgccagtgtctgcgcctctgataccacccgtatcatctcccagcaggtggtgggctccgtcaccttcaacaaccagttgggctgctcccaggtggctcccgaccagcagttcaccatggacgttatggccggctatgccgccaaccccaatgtctacggcaccgtggtggtgtccctgggctgcgagaactgccagatggacctggtggtgaaggccatccaggagcgcaccaacaagcccctgaagcaggtcatcatccaggaggccggcggcaccctgaaggccatcgacatggccgtccgctacgccaaggagatggtggaggaggcctccctgctgcagaaggaggagttccccatgtccgagctgattatcggcacggagtgcggcggctctgaccccaccagcggcctggcggccaaccccctgatcggccagctcagcgacctgattgtcaaggagggcggcacctccatcctgtctgagaccactgagttcatcggcgccgagcacctgctggcccgccgcgccatcaacaaggaggttcacgaccgcatctttgagatcgtccaccgctatgaggactccctgcgcctggtgggcgaggaagtccgtgagggcaacccctctcccggcaacaaggccggcggcctgacctgcctggaggagaagtccctgggctgcatccacaagggcggccatagccctgtcatggcggtctatgactacgccaagcaggtggaggccaagcagggcctggtcatcatggataccccgggcaacgacccctcctctgtggcggccatggtggccggcggcgcccagattgtggtgttctccaccggccgcggcacccccaccggcaatcccctggcccccgtcatcaagatcaccggcaacaagctgacctacgccaatatgattgacaacatcgatgtggatgcctctcccctgatctacggtaccaagaccatcgaggagctggggcaggagctgttgaagctcacgcaggaagtggcctgcggcaagcagaccaaggccgagtctctgggttataccgagatggccatcgctcgcgtgtgcaacttcgtgtaagctctgctggacgtcgcgcatagaagtaaagagaatccatcatgcagccgcggcggtacgatatgcaaatccccccttatcgtgccgccgcggcttttcacaagcacccacccatctgccgggcgggatcgccgcagggaaatgcggcgcattttataacaggagatgagtataccgatgaaaaagaaatttgccgtcatggacggcaatacggccgcggcccatgtggcatacgcgttcacagaggtcgcggcgatctatcccatcaccccgtcctctcccatggcggagaaggtggacgagtggtccgccaaggggcggaagaacctgttcggctccacggtggacgtcatccagatgcagtctgaagccggcgccgcgggcacctgccacggctccctgcaggccggcgctctgaccaccacctttacatcctcccagggtttgatgctgatgatcccagccatgtacgccatgggcggccaattcctgcccagcgtcatgcacatcgcctcccgcgtggtgaccagcaaccaccactctatcttcggcgatcacaccgacttcatgacctgccgcaccaccggctacgccatgctgatgtcctcctgcccccaggaggccatggacctgggcgcggtggcccacctgtccgccatcagcggcaagtacgccttcatgcactgcttcgacggcttccgcacctctcatgagatgcagcggatcgaggcgttggactatgaggacctgcgtcctctggtagaccaggaggccctgcaggagttccgccgccacgccctgaacccggagcaccccaccaaccggggcaacaacgtgaaccccgacgtgtacttccagtgcaaggagggcgccaacgtcaaggccgcctccatccctgacacggtccagcattacatggacgagattaacaagctcaccggtcgggactacaagctgttcaactactacggcgcgcctgacgcggaggaggtcatcgtggtgatgtgctccgccagcgaggccgtgaaggaaaccgtggactacctgaacgccaagggccgcaaggtgggcatggtgcagatccacctgtaccggcccttctccgtgaagcacttcgcagcggccatccccgccacggtgaagaagatcgccgtgttggaccggtccaaggagaccggctccgtgggcgagcccgtgtatctggacgtggtcaccgccctgaatcaggcgggccgcggcgacatccgtgtggtgggcggccggtacggtctcagctccaaggacaccaccccgggccagttcatcgccgtgtatgacaatctgaagctggagaatcccaagaacagcttcaccatcggcatcaacgacgacgtgactcacacctctctggactacaaggaggtggagctgcctcatcccggcgaggtttcctgcaagatctggggcctgggcggcgacggcacggtgggcgccaacaagaacgccatctccaccatcggcctggtggccaacaagtacgcacaggcgtatttctcctatgactccatgaagtccggcggcctgacccagagccatctgcgcttcggtgacgagcctatccgctccacctatctggtgtcctccgcggactttgtggcggtccatgcccccacctatgtcaacaagtacgacaccaccgaggatctgaaggacggcggcatcttcctgctgaactgcccctggagcgcggaggagctggagacccgcctgcccggcaagatgaagcgggacctggcccggaagcacgccaacttctacatcatcgacgccgccaagctggcggtgcaggtgggccttggcgagaagcggaccaacaacatccttcaggctgccttctttgccctgaccaaggtcatccccctggatatggccgtggaggacatgaagaagaacaactacaactcctatttcaagaaggccggccagaagatcgtggatctgaacgacaaggccgtggatctgggcatcagcgccgctgtgaaggtggagatccccgcctcctgggcggacgcgcctgacactcccatggccgagcccaagaacgcctctgcctttgtccgtgacatcgtgctgcccatggaccggcagcagggcgacaagctgcctgtgtctgtgttccagaagcacggcgtgctggacggcacctgggaaaacgggacctccgctttctccaagcggggcgtggcaaccaaggtgcccaagtggaacgcggagagctgcatccagtgcaaccgctgcgccatgtgctgcccccacgccgccatccggcccgtgctgctggccgaggaggagaaggcccaggtgcccgcgtcctttgagaccgtgcccgccaagggcctgggcaaggacgcccccagctacttcttccggatgcaggtctctccctatgactgcctgggctgcggcgtgtgcctgaccgcctgcccggccaatcagagcgacaagacggcggacgccctggtgatgacccccttcgaggagatgaagtccgaacaggcgaacttcgacgaggtcgccatgaacgacaagtacctgaagaaggatgtgatcaacagcaagaccgtcaagaacatgcagttcgccaagccgtacttccagttctccgccgcctgcgccggctgcgccgagaccacctacatcaagctgctgagccagatggtgggcgaccggatgtacgcgggcaacgccgcaggttgctcctccgccatctccggcggcgcgcccatcctgccctactgcaaggacagccagggccgcggccccgcctgggagcactccctgtttgaggacaacgccgagttcgcctacggcttcttccacgctcaggatgccatccgcaaggagctgctgatccggctggagagcatgaaggacgccgacatcgcccctgcggagatcgaggactacatcaacaactggaacgacggagagaagtcccgcgccgtgtccgacgccctgatcgccgccctggagaagtgcgagcagaccgaagatgtgtcctatatcctggagaaccgtgagtatctctccaagaagtccatctgggccatcggcggcgacggctgggcctacgacatcggcttcggcggcatcgatcacgtcatggcccagaaccgggatgtgaacctgctggtgctggacaccgaggtgtactccaacaccggcggccagtcctccaagtccacccccacctccgccgtggccaagttcgccgccggcggcaagcaggtggccaagaaggacctgggcgccatcctgatgacctacggctatgtgtatgtggcccaggtggccatgggttatgaccaggcccagaccctgaaggccctgcgggaggcggagtcctatcccggccccgccatcgtcatctgctactgcccctgcctggagcagcatatcaaagccggcatgagctgtacccaggacgagatgaagaaggcggtggagtgcggctactggcacctgtaccggtatgatccccggcgcatcgccgagggcaagaaccccttccagctggactctcccgcgcccgatactgacaagctcatggacttcctcatgggcgagaaccgcttcgcctctctgaagaacaacttccccgagcgggcggacgccctgtaccagaaggagatcgccgacgtcaaggcccggtaccagaagtaccgcaagatggcggaggactgatttccgaaggaacagatcaaatacagatgccccggcgccggttacggcgccggggcgttttctctgcgctgcgggcattcctgcccgcggcgctttttgtggtgagcggagggagagatgcatataacctggaagagaggaaggcgggaaaagaaatttccgccgcgttgcacgccgccgtgcgcgccggccgggaaataaaggatatggttgacggctccggctatgcatagcggagccgccggaaaggcacgatagcggttgaagccaagcgaatttcagagcagggaggacacgaacgtgaagagatggcacaaggccttgatcctatcgctgatgggcggggatctctactgcatggtggagctgatctggcgggggcacacccactggagcatgtttctgctggcggcgatgctgagtctgccgctagatttggccaacgagcacatggcctgggagcggcccctgtggctccaggcgctgatcgggggcagcgtcattaccttggcggagctgggagccgggctgatcctgaacgtctggctgaagctggacatctgggactactcccgcctgccggggaacctgtggggacaggtgtgcctgaagtacgccctgctgtgggtggtgctggcggggaccgccatcgtgctgttcgactggatgcggcactggctgtttcaagaggagcggccccactaccgctggatctgagaggagggatgcaggatcggaacggaggtgctctgcgcgctgatcgccggagcggctaccgtactggcggctggggcggaataccgctcccggaagagtgccaggcgagcagaggcccgggcagcgcgccgggctacggagagcaggctggctatggatctgatgtacgccacctgttcgttgtccctgaccacggccaaaaagttggcgggtcaacataccaacggcgacgtggaggaggccatgcgtgcagcggagacggcccgcacggcgtatatcggcttcgtccgcagcgaggcggcccacagcgtcagtaaaatttgagccgggcaggacccggagagaggatggtacataagatgaaaaccctggaggaagtgctgtacgattacaccagaggagagaagactctggaggaggccaacaaggccctgaaggagctggggtgcgggctcaccctggaccccacccgcaatctcttctccgcccgggagctgctggagacccgggcgggagagacgccggacgaggccaacggctggggcattctggaccacggtgtgggcagcctggaaaaggtccatgtggtgaacggccgcacggtggacgtggacatgggccaggagaccgcctatgtctatatgcccggaaagcgataccgcctgcggggcgatgtgctgacggaggaggactgagatggagctgctgacacagcgcttggccagcctgctgacggtgaagagtctggtgacggtgattctgacggcggtatttgctgccatggccggaacgggccgggtgaccgcggagcagttcttgaccgtgttcaccgtggtgatcgctttttacttcggcacgcaggcggaaaagcgggcccgggaatgagcgtggggacatacagccttgcccgggagggggacaagctgctgtccccccacttccgggtgcgggagttcgcctgccgggacggggcagacctggtgaagatcgacacggatctggtggagctgctggagcggatccgcactgccgcctgcggggcggtgaccgtcaacagcgggtaccgcaccgcttcttacaatcagaaggtgggcggcgccagagccagccagcacctgctgggcagggcggcggatattcaggtgagcggtgcctcgcccctgctggtggggcagatagcggaatactatctgggcggacacggtgggatcggcgtctatcagaccttcacccatgtggacacccggaccgcacgagccagatgggaccagcggagcggacgggaggtggccgtctccggctggcccggctggcggcccaaggaggaagcagtcatggacaacatccccagcgcgtatgcggaggaagcagtggcctgggccgtggaaaacggccttttgcagggcagcgaggcggggaacctgatgctctcccagcccgtcacccggcagcagctggcagcggtgttgtaccgctttgcaaagctggaggggcagacctgatacattattaaaatatagggtttccagaatgcggcggcgtttccgggcttttccggaaacgccgccgcatgattccgcagatttcacaaatgctagagccggggtgattgtatgcggcaggcacaagctccgcagaggaagtcccccagccgaacgcccgccctgcggatcgagccggaaaagcggctctgtccggcctttgacccggtcagcatcgccaccttcccggtggcggagccggaagagatgggctatcgggtgctggacaacttctgtgaggagcatatccagtaaacggaggagccgtgtccgggcgctgcctggatgcggctcttctgtcaggaagttctgtttgtcatgggcgcggaatcatggtacaatggctgtaaggacagccgctggatttcacggcacggcggccgcgtgacatctcaatgaacaagacggggagtggacccattgaaacgatgcttcatttttgccgcaggcacctattacggcctgcgggagcggccccagacaggggacctggtgctggcggcggatgccgggtatctggcctgccgccaggcggggatcaccccggatctgctgctgggagactttgactccatggatcagcccgcggactttgaccatgtccgccgggtgccggtggagaaggatgacacggacaccatgctggctgtgaagacggggctggagcagggctgcggcgagttttacatttacggcggcaccggcggcaggcggctggaccacaccctggccaatctgcagacactgctgtatctgcgccgccatggggccaggggatacctctatgacaatgattttgtgtggacggctgtggagaatgagaccatcactgtggagcagacggtggagtggggcctgctctccgtcttctgcctgggtgcaccggcctccggcattgacgagaagggtgtgcagtatcccctctcccacgcctccctttcggcggagttccccctgggcgtcagcaaccacatcatcgagcccaaggcccggatcaccgtccggaagggcgccctgatcgtggggtgggagctgccgtctggtggcgttgtttccgagataaaatagcgtgccggacaaagttcagttgcggcggcaagaaagttattgtataatagagacagcggaaaggtcgacctttccgaaagaacaccgatgaccgtgggaccagggttgggcacggcagtcaaggaggaacttgccatggcaaaatttaccgtgaacggccgggccgtgacagtggaaaacaaccagaagctgctccgctacctgcgggataccctgcatctcaccagtgtaaaggacggctgcagcgagggcgcctgcggcacctgcacagtgctgatcgacggtaagcccaccaaggcatgcatcccccagaccgataagctggagggcaagtccatcgtcacggtggaggggctgaccgattttgaaaagcaggtctatacctacgccttcggcatggcgggggcggttcagtgcggcttctgcatccccggtatggtgatgagcgccaagggattgctggatatgaatcccaatcccacccgggaggaggcggcctacgccatccgaaacaatatctgccgctgcaccggctatgtgaagatcattgatgcgattctgctggccgccgagctgttccgcaagggcgaggtgccgccggctcccgctgattggtccctggggcagcgggtgccccgggtggacgtggaggagaaggtcactggcaccggcatctatcccgacgacatctatctggacggcatgatctacggcagcgccgtccggtcccaatacccccgggcccgggtgctggccatccacacggaggaggccagggccctgcccggtgtggtgggggtctttacggcggaggacatccccgggcagaacaaggtgggccatttggtgaaagactgggacaccatgatcgccgtgggggatatcacccattacttgggtgacgccatctgcctggtggcggcggagacaccggagatcctggcccaggccaaggccctggtgaaagtggactatgaggagctgcccatggtccgcagtccccgggaggccatgctgccagacgctcccctggtccaccggaccgggaacctgctgacccacaagcacatccagcggggcaacccggcagaggccatcgccaaatcgaagcatgtgctgacccagcacttctccacaccctggacggaacacgccttcctggagccggagtgcgccgtggcctatcccgacggggacggggtcatgatcctctccacagaccagggcgcctacgacacccagcacgagaccatggggatgctgggattgccggcggaaaaagtgaaggtccgcaactgcctggtgggcggcggcttcggcggcaaggaggacgtgacggtccagcaccacgccgccctgatcgcgtacctgaccaagcgcccggtgaaggtgaagctcacccgggcggagagcattctgatccaccccaagcgtcaccccatggagatggagttctccatcggctgcgacgagaacggcatcatccagggcgtggccgccgaggtcatcgccgacaccggggcctacgcctctctgggcgggccggtgttggagcgggcctgcacccacgccgccggtccctacaactaccagaattttgagatcgacggctgggcctattataccaacaaccctcccgccggggccttccggggcttcggtgtcacccagacctgcttctgcatcgagagcctcttaaaccagatggcggacatcgtgggcattacccctgggagatccgctaccgcaacgccattcgcccgggacaggagctgcccaacggccagatcgtagacaactccaccggcctggtggagacgctggaggcggtgaagccctatgtggagaataaccagtacgtgggcctggcttgcgccatgaagaacgccggcgtgggcgtgggcatcccggacaccggccggtgccgcctggtggtggaggacggcaggctccacatctttgccggtgcctcctgcatcggccagggcctgggcacggtgctgacacagatggtctacgagcagacgggcattccccgggacaggatcgtctacgagcggtccaacacctactgcgcgccggactccggcaccacctccggctcccgccagacgctgttcaccggcgaggcggtccgccgggcctgccaggatctgaaggaggccatgggggcctccggcggtctggacgccctgaacggtcaggagttctatggcgaatacctgggaaagacggaccctctgggggccccggtgcccaaccccgtcagccacgtggcctacggctacgccacccaggtgtgcatcctggacgacgaggggaaaatccgccagatggtggctgcccacgatgtgggcaaggccgtgaatcccctgtccatcgaggggcagatcgagggcggcgtggtgatgagcatgggctttgccctgacggagcggtatcccctcacggactgcaggcccaccgccaaatacggcacgctgggcctgttccgggccaaccagatcccggagatcacccccatcatcgtggaaaaagcgggactgaacgtggcctgcggcgccatcggtatcggcgagatcacctccatccccacagccccagccattgcggacgcctactaccgctacgacggcaagttccgtaccagtctgcccctggagggcacgccttacagccgtaaataacaagcgccgcggcggtacttccgccgcggcctgtccgaatctgcgttacccccgctctcgcactgtcacatggacggtgtctccgggctgcttcccgatttgggcccggatgtccttgcgcatccccaggatgtggccgggagtgcccatccgcaccaggctccccgcgtaggggacgccgtcaaaggtggcagccaccttgactcggcccttaccgaatagcgcctgtacgtcatgggggaattctacataggctccgtcgatgtccggaactttccggatcaccgcatcgaattcatagacggttggattcatacctgctcctccgctttcaattcctccagggcttgggcggtatccacgtcgcggagctcctccgccgggacgtccagaaggaggagatccgcctcgtgccgccggataacggtgttgccgccgtggtcctcccgcagctccagcagctccggaaagaaccgggcagggaagaggcagggattgccccgcacgccgccgtggcccagagcgacgatcttctccggccgggtgcgccagcggtccaccagctctgccacgctctcacgccgcaggaggggctgatcgctcacctggaacagcaccccgtcacagtcccgcagagccgtcaggcccagttcgatggtgtggctgatgccgtaatccgggtggggattgtggatggcggcgaagtggaactccccggccagccgcatgacctccgggtattgagtcaccaccacgactttgtcaaacttctcggccgggacggcttccagcgcccggaggatgagactcctgccccgcagctgggcggccagcttattttccccaaaccgccgggcgttgccggcggccatgaccacacaaccgattttcggcttgttttccacatccatcacctcattttatcagtagtatatccgctttcgccgtgtccagtcaatgggcggcggaactttgatcaaaaaaggaggcttgcctgatgagcaaaagcgtcggcaaaagcgtcacccgtgtggacgcctatgaaaaagccacgggccgcgccaagtatgtggcggacctgtgcgatcaaagcgccctggtggccaggatcctgcacgccaccatcgcccacggctacgtgaagtccatcgacactacggaggctgaggccgttcccggtgtggtgaaggtcctgacttgcttcaacgtgcccgattaccgcttccccacagcgggacacccctggtccacagatcccgcccaccaggacgtggcggaccggctgctgctgaaccgtcacgtgcggtattacggcgacgacatcgccgccgtcatcgcggagaacgagatagctgccgctcaggccgtccgggcgctgaaggtggagtatgaggagctgcccttcgttctggacgtgcagaaggccatggagccggatgccccacagatccacgaggactgccccggcaatgttctgaagcacacagatatccgcagaggcgactatcagaccgccatccaggagccgggcctgatccgggtggagggctggtacgacacccccactgtccagcactgccacattgaaaaccacggctgcttcgcctatgaggaggcgggccgggtggtggtggtcacctccacccagatcccccacatcatccgccgggtggtggggcaggcactgggtctgccctggggcaaggtgcggatcatcaagccctacatcggcggcggctttggcaacaagcaggacgctctgtacgagcctttgtgcgcctggctctccacccaggtggggggacggctggtgcatctggagtgtagccgggaggagacctttgtctctaaccgggtccgccacgccatccgcacccacatcatctcctacgtccggccggacggcaccctggtggcccggaagtttgaggcctggtccaaccagggggcctacgcctcccacggccacagcatcgtggccaagggcatgggcgccttcccccagctctacccctgcgacaatttggagtgcgactgctggacggtctacaccaaccgccccgccgccggcgccatgcgtggttatgggatccccaggccatgtgggccggggagtgccacatcgacgatatctgtcaggctatcgggatggagcctatggaattccgccggaagaatctgatgccggtggggtataccgacggcttctccagaaacgagttgtacgccgacaccttcaaccagtgcatggacaagggaatggcgatgctggattaccagcggaaatatcgggaataccagaaccagactggccctgtccgtcggggcgtgggccttgcggtgttctggtacaacacggctgtgtggcccatctcgctggagtcctcctcctgccggatggtgctgaaccaggacggttccctccagttccagaccggtgagacggagattggacagggctgcgacaccgcctattcccagatggtggcggacgcggtgggtatcccggtggaggacgtccatgtggtgtccacccaggacacggacgtgacgcccttcggcaccggtgcctacgcctcccggcagacgtacatcggcggcttcagcatcatgcagacggctcaagcattgcgggagcggattctgcagatcgcccacgagcagacccggatgccggtgtctgttctggatctggtggacggcaagatcatccgcaaggaggacggccgggtcctcaagactctgggcgagctggcaacggagagcctctactccctggagcacagtcagcacatcaccgccgagaccacggcccagatcaagtccaacgcctactccttcggctgctccttcgcagaggtggaggtggacgtccctctgtgcaaggtgaagctgctgaatctggtcaacgtccacgactgcggcaccctcatcaacccggcgctggcagaggcccaggtccacggcggcatgtccatggccatcggttacggcctcagtgaagagctgaagttcgacgagaagaccggaaagcccctgaacaacaatctgctggactacaagctgtccacctttatggaccatcccacgctccaggcggcgttcgtggaaaacccggagcccacctctccctacggcaccaaggccctgggcgagcccccggcctgttcgccggcgccggccatccgcaacgccatcctgaacgccacaggtgtggcctttgacgcatgccctatcacgccccatgtcctctaccgcggattcaaagaggctgggctgatcgaagactaaaggagggaaccactcatgtatgatatgaaagccctgtatcaggcggagagcgttcaggacgcggtggccctccgggtggcccatccggatgcccagatcatcgccggcggatccgacgtgctggtgcagatgcgggagggcaagcgggccggggtggagctgatctccatctacgggctggatgaactccggggcgtgaccctggaggcagacggcaccctgcggatcggctccctcaccagcttttccctcattacccgggatcccctgatccagaaatacctccatgttttgggagaggccgtggaccaggtgggcggtccccagatccgcaacatcggcaccatcggcggcaacacctgtaacggtgtcacctccgcggactccgcctccactctccacgcctacgacgccattgtggagctgacgggaccggacggtatccgccgccagcccatccgggagttctacatcagggcaggcaaggtggatatccgtcccggcgagatccaaacggctatcctgatcgaaaaagacagttatattgacacatttggccactatataaagtatgccatgcggaatgccatggacatcgccaccctgggaacctctgtgaacgtccgcctttccgccgacaaaaagaccgtggagcgggcgagagtggccttcggcgtggcggggccggtgcccctgcgggcggcggctgcggaggagctggccgccggacagccggtgagcctggagctggcggatcgctttgcccaggcggtgaaggaggacatcaatccccgggactcctggcgggcggccaaggatttccggatgcacatcgcggtggagagcgcccggcgggcgttcatcgaagcggtgaagctggcgggaggtgacctgtgatggaaaagcatgtgatgcagtatcagactgttcacttcaatctgaacggcaaggacgtggaacgcacggtggacgtgcgggccagcctgacggacatgctccgcaacgacttccggatgacctccgtgaagaagggctgcgaggtgggggagtgcggcgcctgcaacgtcctgatcgacggggaggcatacaactcctgcatttatctggccgtgtgggcggagggcaagcacatccgcaccctggaagggctgctgggccctaacggcgagctcagcgacatccagcaggcctttgtggacgaggcggccatccagtgcggcttctgcacgccgggctttatcctgacggcagtggagatcctggagagcggcaaggagtacacggacgatgaattgagaaaactcctctccggccacctgtgccgctgcaccgggtatgagaatatcctccgggcggtgaaaaagaccatgtacaagcgcctaggcaagcccatgccggaggcgtgagatcttcaaaagcaacccggccgcgcacagcggccgggttgctttttgggggatgcgcggcagaacggttttcttttcccgggaattgtgttatactggcaccagatgaaaaaggggagggaatgccatggcccgcaagacctatacggaggaggaccgggcccgggtgcggcaggctctgctggacacggggctgaatatggccgtaagcaagggtctgaaggggctgcacttggcggagctcgccgcggcggtggggatttccaagccctatttctacacgttttttgactcgctggaggatttttccctccagatgatggaggagcagcgctgccgtctgctccggctgctggaacaggagctggcccggccggaggggacctgggaggagcacgtggagtcttttttccggacgatcctccgccaccgggaaaacggcatcctggtgatgacccagggggaggaggcggatctgcacagccgcctgacgccggagcgattccaggatttccggcccgggcagcgggatttctttctgcgcctgatggcgctgctggacatccggcaggaggactgcgcccctgaggtgctggcgaacctggtgttctcctgcctcctgatctataactccgcgccggaatccatgccatttctgtttccttcgcacctggaggagacggcggcgctgcacgtgaaatttttggtgaactatctgggctccctgcgcaacgcaaaaaaagaccgctgatgggcggtctttttttgtgcgctgataattacccagttgcgcaatccggtttcttttggtatgatatctcatatattgaccagataaaataaaatggtcaatataaaattgagatattaaagagggattgtcatgggaattttcggaaaactcttcaagggacctgaaattgaccaggccaaaagcgcggacagcaagcagaagatgcgccgcctgtttgacagcgtggtgcccgacggcgggcagtaccagctggtggccgcctatacggaggatgcgaagcggttcaactacggcctggtccacggcagcaagactacctacggcagcctgatcgtgggctggaaggagggggcggaccccacggtggtggtcgtgcccacagttccggacctctccggctgcggcgatccggaaatctgcccccgttccgcagtcaaaaaggcctatcagaataagtaccccacggacgccttcatcatctacccggatgggcgtcactatctggccatcaacaccttcgagtggctggaggatgagaagctgttcatctacgtggaccagggaccggaagagcaggcctttgagactttcttcaagacctgttacgccacgaagtgaggagcgcgtgccatgtcgctttccctggagcaggtcggtgccgtcctgctggccctggtgattctctttgtggcgggacacctctggtatgcactggtggagatggtgaaggatgctattgcccgccgctttttttccggaaaacgggagccctggcatccccttccgccggatgagggcgattccggcgacggtccgcccggtactgtttgacggcggcctcttcttgcggtataataaaaccaacaaggagaggagggttctctatgaaaaccatcatcaccatcggccggcagtttggcagcggcggcaaggagatcggcatccgcgtggccaaggagctgggcattcccttctatgacaaggagctgctgcaggaggccgccaagaagagcggcctgtgcgagaagatttttgaaaacttcgacgagcggcccaagagcctcctgtactccatcgccatggattcctatatgtttgccctgcccggcagcggtgtgggtgactctctggaacaacaggtgtatctggcgactttcaacaccatccggcacatcgcggaccaagggccctgcgttatcatcggccggtgcgcggactacgccctggcggactatcccaaccacctgagcctgtttatcagcgcacctctggaggtccgtatccagcgcgtggcccagcggcagaacctcacgccggagaaggcccgccagctgatcctcaagaccgacaagcgccgggcgtcctattacgagtactattcctccaagaagtggggcagtgtggacagttaccacttctgcatcgattccagctatctgggcctgggccggaccgtggagctgatccaggccatggtggcccacaaggagcatccgatccccagccccacggaggaggatcccacccgtccccggacgtaagcgccgcaaaacacggagggaccggagccgcacaggctccggtcccgttttcctgttcagagaggataactcctgggcaggcacggcggctcacgccgcaccgggtcatggccgatggtccagatcccggtagaagcggaaggcatcctcgaatttcccctgggcgtaggtgcccacatcggcgcagtaggcctcataggccgccagaaggcgctccgcctccggcgtcagcaccgcgccgccgccgtgggcacctccgatggtggaggagagcagcttgcacccaaacactgtctcagctgtgcggatgatacgccacgccttggagtaggccatttccatagaggcggctccggcccggagggagtggtgctcccgcacccgctgcagcagggtggcgatgccggggccgaagcagcgctggtcatcgtcgctgtaaatccgcagcgtcactttcaaatggagctcattctgtgccatagggcgcctcctctgtttctgtcccaatcccccgccgggaccgtccggacacccatccggggcccgacctgccgggcgagaccccaataggctgaggacaggggtgccggggtcccggacgggagatcatgtccctccgaagcgatattctgcttctatcatatcacaggatttgcggtttgcaaacctggaaaaatgtgatacaatccaatgcaggggagtgacccgctctgtgcgggaaggaggaactattatggagaaaatcagactgggccgtaccggcctgctggtgaccaagacggcgttcggtgccctgcccatccagcggatttccaaggcggatgcagtgaagctggtccgccgggcctgtgaggcgggaatcaactatttcgacaccgcgaatatgtacactgacagcgaggaaaaactgggagaggccctccacgacgtgcggcagaacgtggtgatttccaccaagagcggcggaggagacaaaaagacggtccaggcccacattgagcagagcctccgcagcctgcggacggattacatcgacctgttccagttccacaatccggcggtgctgccggatatccatgacccggacgggccctttgccgccgcactggaggccaagcagaagggctacatccgccacatcggcatcaccaaccatcggctgaaggtggcccacgaggccattgagtccggcaattttgagacgctgcagttccccttctgctatctggccacggagaaggacctggagctggtggagctgtgccgggagcacgacatgggcttcatcgccatgaagggcctctccggcggcctgctgaacaatgcggaggcctgctacgcctttatgcaggagcatccagacgtggtgcccatctggggcatccagcatgagtgggagctggaccagtggctggagctgacggagcggaatccccgcatgacgccggagctccaggcggtgatcgaccacgaccggacggagctgtcgggggacttctgccgctcctgcggctactgcctgccctgcgccgccggcatcgacatcccccaggcggcccggatggcccagctgctgcggcgggcaccctacaagccctatctgagcgacgagtggcgggagaagatgcaccagatcaaaaactgcatccactgcaacgcctgcaagtcccgctgtccctatgggctggacaccccggccctgctgcagaagcagctggcggactacgacgcgttttacgccgcccatcacaacgactgaaaaggagaaccccagatgctcttccgcaatgaggagtccagcctgaggctggatatcgtgaactatgaatttccgccggacggcggcgaccccaccagtgacgaccggaactggctggtgctccgggccacttggaacaaggaggacggagacgtggtgaaggattccaacagctgcctgctgacccacgagctccagagcatgagcgccgggctgaaagtgctgaaggctggaatccgggatgtgtacgtcagtgactttcaggagaacttttacttctccgtcggcgcccgggcattgggagacgggacctttgaagtggtggtgtccttctatctgcccaacaccatggacggggacgacaccgctgagatcacctgcaccatggaccagaaggagatggaggcgctgatcggcgaactggaccggctctgcgaaaaattcccggatcggacctgaaaaaccccggagccccggttggaaagaaggtgaacaggcttgaactataagacgagctattggctgatgcggatattgggcatcggcggcattctggtgatgctgatcggcgggatcaccggcagaaccgtcatcggcgtgctgggcatcatctgtgtgctggttgggacgcttcagatgaatttcttctaccactgcccccactgcaagcgggatctgcccaagcggaccctgcccaaaacctgcccctattgcaagaagcccctggactgaacggagggcggccatggactacaagaagagttatacgctgctgtgggtggggctgattgccggattcgtcctgatgctcatcggcgtgtttctggagattggatggctactgtggccgggagcggtggttgttatggcggatgttctccagacgctgctgttcttccggtgtccgtactgcggcggacactgggatccccggggcggcattccccactactgcccggagtgtggggagtacattcggtaaaaatcctgttatactggcaaaacaaggccgctctgcatttgcagagcggccttgcggctgtgtggaacaagcggcagtgtgttccatcagatgagggcgctgcttccgcggcgccctcatctggcttttcgttttttacttactctgccttggggccggcagctaccagagccttgcccgcctcgttggcggcatacttggagaagttcttcacaaagcgagaggccagatccttggctttggtatcccactcgccggcgtccgggtaggtgtcccgggggtccaggatggcggggtccacaccgggaagagcggtgggcacctcaaagttgaagtaggggatggtcttggtgggagcagtcagaatagagccgtccagaatggcgtcgataatgccgcgggtatccttgatggagatgcgcctgccggtgccgttccagccggtgttcaccaagtaggccttggcaccggacttctgcatcttctttaccagctcctcgccatacttggtgggatgcagctccaggaaggcctggccgaagcaggcggagaaggtgggagtgggctcggtgatgccccgctcggtgccggccagcttggaggtgaagccggacaggaagtagtactgggtctgctccggggtcaggatggaaacagggggcagcacgccaaaggcgtcggcggacaggaagatcacattcttggcgtcgggtccggcggacacgggtcgcacgatcttctcaatgtggtcgatgggataggaaacgcgggtgttctcagtgacggagtcgtcggcgaagtcgcagtggccgttctcgtccacagtcacgttctccagcagggcgttgcgcttgatggcgttgtagatgtcgggctcggcgtccttgtccaggttgatgaccttggcgtagcagccgccctcaaagttgaatacgccgttgtcatcccagccgtgctcgtcgtcgccgatgagcaggcgtttggggtcggtggacagggtggtcttgccggtgccggacaggccgaagaacagggcggtgttctcgccgttcatatcagtattggcggagcagtgcatggaggccatacccttcaggggcaggtagtagttcatcatggagaacatgcccttcttcatctcgccgccgtaccaggtgttcaggatgacctgctcccgggaggtgaggttgaagatggcggcggtctcggaattcaggcccagctcctgatagttctccaccttggccttggcggcgttgtaggagatgaagtcaggctcgaagttctccagttcctcagcagagggctggatgaacatattcttgacgaagtgggcctgccatgccacctccatgatgaagcggatggccatgcgggagtcgtggttggcgccgcagaacacatccatcacaaacagacgcttgttggacagctgctcctgcgccagcttcttgcaggcatcccaagcctcctgagaggcgggcttgttgtcgtttttgaactcgtcggaggtccaccacacggtatccctggaggtgtcgtccatcacaatgaacttgtccttgggggagcggccggtgtagatgccggtcatgacgttgacggcccccaggtcggtgacctgtcccctgtcatagccctccaggccggccttggtctcctcctcaaacaggaactcataggagggattgcggataatttccgtggtaccagtaataccatatttactcagatcaatggttgccatttgaatgacctcgtttctgaataatcttccagccggcgcggcggaggggcatttttcgtatcaatatcatacacggtgcgggagataaagtcaatctccatccgcctcccgccccagcgcggcggagagggccgcgaagtcctcaagcgtcagctgttccccccggacggcggcaggcaggcccatatcggcgatggcctgttggatggattccttgggaatccccggcagggcggcggagaggctgttggccagggtcttgcgccgcagcaggaagccgccccgcatcactttgaagaaaaagctctcgtccgctacatccacggcgggccgctcccgccggacgcagcggatcacggcggaggtcaccttgggagcggggagaaacttctccggcggcacgtcgaacagcagctccggcttcatgtagtactggaggaacagggagaaggagccgccctcagaggagccctgtggggcgcacagccgccgggctacctcccgctggatcatcaccgtgaaggcagtaaagcagggggactccaccagcttttccagaatgggagaggtgacgttgtagggcaggttggcgcagactataggcgtgaggccctggaacttctctgccgtgatggccgtgaggtccagtttcagcacgtcccccggcacgacctccacattcggatagggggccatggtctccgccagcaccggcagcagggcccggtccagctccacggccaccaccttcccggcccgctgggccaactccgccgtcagggggccgatgcccgggccgatctccagcacgccgcagcctgcgtccgcgccggaagcctccgcgatccggcggggcacctccggatcgatcaaaaagttctgtcccatggatttggagaaatggaacccatgccgggccagcaggtcccggatggtgttgtagtcacagagattcatacctgatcccgcctttcttcagcagtatatcaaatttttgcgggtctgccaaccccatcccggcgagggaatggtccttgcaaaataccgcctgatccggtaaactggtggcatcaaaaaatccccaggagggatgcagatgcgattcatttttctggacctggacgacaccattctggacttccaccgggcggagcggcaggcgctctcccagaccctgcggcactttcatgtagaccccacggacgccgttctggaccgttatcacgtcctgaaccgccgacagtgggagttgctggaagaggggaagctgacccggccccaggtgttggtccggcggttccagctgctgtttgatgagctgggggtccgtgctgctccgcaggaggtctgccagctttatgaggaacaactggcccagggccacttcttcgtgcccggcgcccaggaactgctggaggccctgcacacaagatatgagctgtatctggccaccaacggcactcccgaggtccagaacagccggatcgagagcgcaggcatcgcccgctatttccaaaacatcttcatctccgaacagatgggggcctataagcccagcccggccttcttccacgcctgctttgcggcgatcccggactttgatgcggcggaggccatgatggtgggggacagcctgacctccgacatccggggcgcccggaacgtcggcctgcggtcttgctggtacaatccccagtacctgccgccccggccggacatcccggcggattataccatcggggccctgccggagcttccacccctgctggagcggctgtgagcgcgattgaaaagaggtcccccgcttttggcgggggacctcttttcagaatgtgcctctgcgggcagtttcatcactccaggatatagacattgcacgtccgccgtccgaagttgatgcactgctgataggtgtcgtagtacaggtccacgatatttccccgcacgccagtatccgccgccacggcggtgccgtagaccacggagccgtcggccgccacgatatacatcttagtgcccagggggataacgttcttgtccacagccacggtgcccaccttgaccagagtgccggtggcggtggtgtagtcagcgccgccgtggcccgcggtgtaagcggtggcggtcatggacttcacgccggagaagttcagagtggtgccgtctgtcagggtcaggatgccgctgccgtcggcgtttttagagacgctggcgacgcccgccctggtggaagcgacggcggtgccgtactccacgacttcattcacggcggtgctctccagctcctccacgaactggcgggagatctcctcgccgccggaccagaccacctcatagatggaggtgcggacgccgtcggcgccctcctggaccaccttctccgtgcccttgggcagggagggattggccacccgcactgtctcgtaggtggcgggctcctccacctggtcgtaataggtcagctcggaggcaatggtcagctcggcgctgtcctcgtccagatccacggctaccatctccaggggactgggggtgatgtggagccgttccagcagctctgccacagtctcgctgcgggccttggcggtgacggtgctgccgtcgtgcgtgaccgtgacctcctgtccggcggtcagggccatgtcatagccactctggccgctggagaggtacaccagctgagaggacatctcgccctcccggacttcctcctcgttcagcacgatggcggcgtcctctggaccggtgagaatatacacggcgtttgcgtgatcggtgacgatccagctggtgcagacaacggcggccagcacaaagagctgcagaccgaaccgggccttgaggctgtgcagctttttctcaaaagcatgtgtgttcaaaatcagatacctcctcagaaaaggtcttccatgccagtcttccctggttttggaaggtctatacctcggtgttttcctgaatgaaaacaacttgtaacttttgttaccgattggaaaactggggctagtatacaccggcttcccacttttgtcaagtttttgtgggggttacggtgttatgtctcccactttgcagaaaaacaacgcggtcgagctgtgcaaaagtctggagaaaaaataaaaaaagtaacaaattggtgacataaaaccgacgcaaaaaaacaggccccgcgcctgtctgttcagacgcgggacctgttggggaaccccctctgttttcaagggattcagcggacctccggcgtgaagcccagatcctccagctcgctgacggctgtcttgacgcagttgtcacagccgtcgacggtgacagtcttggtgtccagagagacagagaacttcagctccgcggcggtgagggcgttggtgatgcgcttgacgcagttctcacacatcatatcagggacagaaatcgtagtcatattgagtgctccttttcatttcatcagtttttgaatggtgaccagaaggtcgtccacgacctccagatgtccgttttggatgtcctgcaccacgcaggagtgaatatggttgctgagcagctcccgggaaaaggcgttcagcgccgactggatggcggagacctgggtgaggatgtccgtgcagtagcactctttttccaccatgccccggacgcctcggacctggccttcgatccggttcagccgccggatcagggagtcgtactccggggcctcccggtgcttgtggcggcagggacagcctgccgctgtctcctccgccggtgcctcggcggcggggactgcttgcaaagtctgatcttccatatagaatactcctttttcccgtttcccgtcaaatcacagtttggcccggcccagccgcaatgcgttgcctaccacgcagacggagctgaggctcatggccgcccccgcgaacatgggggacagcagagggccgccgaaggcgaacagcaggcccgccgcgatggggataccgatggtgttgtagcagaaggcccagaagagattctgcttgatgtcccgcagggtcagccgggagagccggatggcccggggtacatcctgcaggtccgagcgcatcagcacaatgtccgcggactcgatggcgatgtcgctgccgctgccgatggcgcagcccacggtggcggcggtgagggctggggcgtcgttgatgccgtcgcccaccatcatcaccttgcggccctgagactggagccgctccaccacgccggccttctcctctggcagcacctcggcgatgacttcgtccacacccaccagggaaccgatgtgctccgccgccgcccggttgtcgccggtcagcagcacggtccggatgccctgcccgcgcattttctggatggcggcggcgctggtctctttcaccggatcggccacagagatcaggcccagcagggtgccgcccctggcgaagtacatgggggtctggccctgggcggagaggcgctccgcatcagatgccagagaggagacgtccacgccgtgctcctccagcaatcggcggttgccggccaggacggtctcgccgcccagcacggccttcaggccccggccagacaggttctcaaagctctccggccggacggtgccgccgtagccatgctcttgggcgtaggcggtgatggcgtttgccaggggatgggcggacaccgcctccaccgccgccgcggcggacagcaggtcggatgcctcacaccgatgggggaggacctccgtcacggcgggggtgccctcggtgacggtgccggtcttgtccagcaccaccgtgtccacgctgtgggtgatctccagaatctcgccggagcggatcaggataccatgcttggcccccaggcccgtgcctaccatgatggcggtgggagttgccaaccccagggcacaggggcaggcgatgaccagcaccgatgtgaacacccgcagcacaaaggagaagggctgcccggcgatggcccagatgacggcggccagcagcgcgatgcccatgaccaccggcacgaacacaccggccactttgtcggcggtcttggagatcggggctttccggccctgggcgtcctccacgaaccggatgatgcgggagagggtggagtcgtcgccggtacgggtcacctggacgtacagcacgccgttctcattgacgctgccgccgatgacctcgctgcccacggccttctccaccggcaggctctcgccggtgagcatggcctcattgacgctgctctcgccctgggtgacggtgccgtccgccgggacccgggcgccgggcttcaccagcaccacgtcgcccaccttcagttggctggtgggcacctcccggcccgtgtccgccaggatggcggtatccggggacagctgcatcagggcggtgatggcgcctttggtcttctgcatattccggctctctaggaacttgcccagggacaccagagtcagcaccacggcggcggactcataatagagattgtggacgtagctgggatcgtcggagatcagaaaggtcatcaccaggctgtacgcaaaggagcagccggagccgatggccaccagggagtccatgttggggttgccgtggaagagggacttgaagcccccttggaagaagttccggccgcagtacagcaccggcacggccaggatcagctgcagcaccgcaaaattcatgggatgggtgtgcatggagaagaggtccggcaggggcagagctggcagcccgaaaggcagcatctgccccatggacacatacagcagcaccgcggagaacaccgccgccgcgatcagctcgatcttccgccgcttcagggcggcggtctctgcatcctcagcattctggaccgtggcgggggccgggtgctccaggtgcagggcggcgccgaagcctgccttctccaccttggccacgatctgctcctgggtgcattgactttcatcgtatgcaatggtcatgataccggtggtgagattcacctcgctgcgctccacgccgggcagcttccgggtgacccgctccacggacgcgctgcacgcggcgcagtgcatcccggagatgtcgtatttttcttctcgcataggaacctccaatctgccggagagataccctccgggggtattctttctgagacctactatatacccctgggggtatttgtcaagaggggaattttcggctgtgaaaaaatgccgtggaatccggaaaaccccttgacaaccgggggaactatggtatgatgaatatgaaatctaacaaaaaatttgtgaaactaaaaaattttgtatggtgaggattatgagagattcgatcaaatgggtcgccaatcggatgcccaagagcgacgaccggcagctttccatcatgtccctggggaacgtggccaaggctcgattcttccacagcagctttccccagtattccatcacgcctctggcccggctggacggcatggccaagtacctgggcctgggcggcctgttcgtgaaggatgagtccttccgcttcggcctcaacgccttcaaggtgctgggcggctccttcgccatggcccggtacatcgccaaggagatgggcagggacgtcagcgagatgacctacgactacctgaccagcgaggcattccgccaggagttcggccacgccaccttcttcaccgccacggacggcaaccacggccggggcgtggcctgggcggctcacaagctgggccagaaggcagtggtccacatgcccaagggctccagccaggcccggtatgagaatatcgccaaggagggcgcccaggtcaccatcgaggaagtcaactacgacgactgcgtccgcatggctgcggcggaggccgccgagaccaagcacggcgtggtggtgcaggacaccgcctgggaagggtacgaggagatccccgcctggatcatgcagggctacggcaccatggccaatgaggcggcggagcagctgcggcaggtggggatcaaccgccccactcacgtgttcgtgcaggccggtgtgggtagtttggccggagcagtgatcggatatttcaccaacctgttccccaacgatccccccaccttcgtggtgatggaggcccgggcggcggactgcctgtaccagggcgccctggcaggggatggacagccgaggatcgtggaaggcgatctcaagaccatcatggcgggcctggcctgcggagagcccaacatcctctcctgggacattctgcgcaaccatgtctccgccttcgtctcctgcccggactgggtcagcgcccggggcatgcggatgctgggcgtgccggtgaagggcgaccccacggtgatctccggcgagtccggcgcggtgggcatgggcctgatcgcggccctgatggagacggacgagtaccaggacctgcgggaggccatcggcctggaccggttcagccaggtgttgctgttctccacggagggcaacacggatcccatgaagttccgcaaggtgctgtgggacggcgaatatccgacggtgtaaaaaagaaccgggggaagcattgcttcccccgatttgttttcggtttaggcggtgatgacggatgtgttgctgtaaagggtttcgctgccggaactgtcttttgcatagagcgcaaccgttgcatagtaacgcacgccgggtgtgccctggtagtccactcttctatatgcggctgaagtattcgtatcaattagaccacttgtatatgtttttacatcttcataagaaccattgctttggcgttcccaaattacaatctctgtagcaccaagtctatccataatatgagtggcattgatgtcaaattctacggcaaattcaccatctcctaaaggagttgccacaactctcgtatatgaaaaataatcgctagctctttgagattgagcacttgcagatactgtacccagaagtattacaaaagtcaaagtaaaaataattaaacgaatgaatttctgcttcatgtgaagactacccctattgtatagaatcgaccatctttttcaatccatcaaaagaaacgtggccttgaatgtgcccttcgaccaccccattcaaccaagctacactgtttgtatcattattactcattaaataataagtaatcccgtccacctcataaagttcgaatgagttactatcaatttgatatgtatcatcgtatttttctggtacagagtcataaatttgaattcgaattgtaaattgctcttgactgttttcgaatgttccttggagtctgatcataccaatttgttcaacaacactaatgcttccgactagttctgtatcttctggaaaccatgtgggaacaactgggagatcagttctttcagaaaccgctaaacgcagagtattatacggatcatcctgcggcgcttctgcttcctcctgccccggcgtcacaaatccaaaggtctccgcggtccagtccgcgaacgcctggaggatgtcgaacccaaaggcggaggcagcgccgcacagaatcacaatgcacgcggccgtgatgacggctgcccgcagaatccggcggcttttctttttgggggaaggggaggtgatttggtcaagatgggatgagtcacgttccgggaggacctcagtctcataggcagaagcctgtccttgataattttccttgaaatcccgccatgcggcgtccacgtcgacctccgccgccgggggattcgcatcccgctgcttcatcacctccataatcgccatgatgtagtccacgtccggctcaccgccgtccgcagccgtgaattcctgctggagcagagcctccagctcttcggtgcgcatttgttccaggaaaggatacgccgtatttcgatctgatggcatctccgggaacctcctctgtatctataatgaccgtttcggccccgcttgttcacaggggcggcgaaaaaacttttagtgccggttccactgtttgacgaaccgctcctttgaacgcttgacccgcatggccagggcggacttcttcaaccccatctcccgcgccagctcctcgtaggtgtacttctccagatagagcttccgcaggatctcgtactcctccggcgtgaggatgctggtgatctccgcccgctgctggaaatcatcctccggagaagcgggcatctcgccggcggcccggatcaggtgcttccgccagaagcggtcctctttcaggagctccaggaccttatagcgcaggacccggtacagccatcccgtgggcgaggcgctgctccaaagatctgcctgatgctcccaagcgaaggcgaacagctcctgcaccacctcttccgcacgcccggcgacggagacgtaccagcttccgccagtccgcagggcgatctccgcacagcggagcaggtccggatacagcttccggtagagggcttcaaatcgcggttcatcaaaagaatcgttatgcgccataggcgtcccccttctctttctatctatcggggtgccgcgccgccggagcgggccgcggtacgaatttgattctaacacaaattgccgcaggtttacaacttttttgcaagcgctctccgcagcacgggaaaaagccgccggaaccgcgaatgtgcggccccggcggcctggatggatcatctgcgctgcccggtcctggtctgctccacgatgtcgtccatgacctcccggctgacggcgccctggacgtagccgaagacgttgccctccgtgtcgatcatgaatgtggtgggataggcgctgatgccgtactggtagaagagcgtgcccgtctcgtccatcaccacgggataggtgtagccgttttcctccaggaaggcggtgatgtcttcggcgctgccctcctggccgatattgggcccggccacgcccagcaccaccagctccccggcgttctcgtcccagtcctcatacagggcctggatgtccggcatctccatcttgcaggggccgcaccaagtagcccagaagttcagaaacaccgtcttcccctggtagtccgagagggtgtgggactggccgtactggtccgtcagggtgaagtccggagcggggaccacggggatctcctggctgtccgccccgctgtgctcctcctgagaatcgccggagggggccgcctcttcgccgctgttcccggcgggctcttcctgcaccgtgccggagccggcagccagatctgcggagatgccgccggtggcgccggtgagggtcaggatgcccatgacgatcagcagcaccgcgccgatcttcaccgtgtagcgcaccacattctggtgggacttgaagaaatccagcaccgtgccggtgaagagtcccactgccaggaagggtagtacgaagcccagggtgtacacgccgatcagcagaaatcccgcagcggaggactctgcggaggaggccatcagcaggacgctgctgagggtggggcccacgcagggcgtccaggcgaagctgaaggtgaagcccatcaccagggccaccgccgggttcatagccagtttgttcagatggaaggggaggcggtgttcctgctccagcagcatggtccgcttgcccagccccagctggtacaggccgaacagcaggatgatgacgccgctggcccgggcgaaccacacttggtagttgtggaagaactcccccagggcggtgaggcccagccccagcaggaagaaggcgaagctgatgcccaccacgaaaaagagggtattgaggaagatctttccccggggatagcggcggacgccgtcctcgcccaccacagcggcgccgccggccagatagctgacgtacagcggcaccagcggcagcacgcagggggagaagaagctcagcgcgccctgcagaaagacagtgacggcggatacgctggtctcaatggaaaagcccatggggacatcctcctgaatatgaagtcatggcgccatcataccgggttttccggccgctgtaaagagggatttgccacatcttccgggaaacacggaagaatcctcttgacagcggggagcggggcggtcaagataaagagtggaaaacaagaccgcaacgggcggcagggaggcactttgcaatggaaatggtggatttgtacgacgagaaccggctccctctgggccggacggcggagcgttacgcccccaagggggagggagaataccgggtggtggtccatatctgcgtgttcgacagccggggccgcctgctgatccagcagcggtctcgggaaaaggccgtctggccggaggcatgggatgtgtctgccgccggcggcgtggatgccggagagaccagccgccaggcggcggagcgggagttccgggaggagctgggcgtggccctggacctgacgggagtgcggccctcctgcaccgtgaacttcgacggcggctttgatgacttcttcctggtggagcgggaccttggcctggaggagctgacgctccaaaaggaggaggtggcccgggcccgttgggcggagctgccggaaatcctggacatggtggaccggggggagttcatcgactatcccaaaagctttctggcgtttttgttcgacatgcgggggaccttcggcttctgcaccaaatgaagctccgcctggaccgaagcttcagtgctttttcggaaaacggccttgacaggggacgttagacatggtataaacaaaacatactgatggtatgtatataaggggggaccggtatggcccgaaacaagcacccggaggagacggtggaaaagatcctggcggtctccgcgaagctgtttatggaaaagggatatgagcacaccaccctccaggacatcattgacaatctgggaggactgaccaagggggccatctaccaccacttcaagggcaaggaggagatcctccttgccatcgcggaccggatgggagagcagacggaggcctggatgcggacggtccgggacgatcccggcctgaccggagcggagaagctgcagaagatgttccgggcatccctggagaactcggaccagacggacctgttcgtgctggcgcccaatatgctgaagaaccccaagctgatgagcatcctgctggagagcatgatcggggaggtcctgcccaactacatggagcccgtcctgcgggaggcggtggcggacggctccatccggacggactacccggaggaactgggggagctgctgcttctcctgtcaaacgtgtggctgaatcccatgatctaccctgccacgccggagaagacccgccgccgcatggagctatacgaccagatgctgcggagcatgggcctggacctgctggatcaggagctgttgaatcagtgggagcgattttgccgcctgtcccaggaacggctgtaaacaacagaagaaactgcccgacagggcagcttctttttcacataaatacataccaaccaaatgtatgaaaaggaggagcgtatgagacaaactgatcggctcctgccccaggacctggccgcctgtctgtggctgctgggtctggccctgctggcaggagagaacgggaggaggaattgagatgcgggaaaagctgtttcaccgggacttcaccttggtggtgattggacagatcatctccctgctgggtaacgccgtgctgcgattcgtcctgccgctgtatctgctggacgtcaccggttcccggagcctgttcggcctgtgctccgccgcggcgttcgtgcccatggtggtgctgacgcccctgggcggcgtggtggcggaccgtctccataagcagcggatcatggtggcgctggacttcttcacctgcgccctggtggccctgacggcgctggccttgggacatctgcccctggtgccggtgctggtggcggccatgatgttgctgtatggtatctccggggcataccagccggcggtgcaggccagcatgcccctgctgtgcccgccggatcggctggtggacggcaacgccgtcatcaaccaggtcagcgccctgtccagcctgctgggaccgctgctggggagcctggtttacggtgccttcggcgtgacaccggtcctggcgggggcctccgcctgcttttttgcttcggcggtgatggaactgttcatccatatcccccatacgccaagacacactggagccagcgtctggcagaccgccagagcggatctggcggagagcgggaccttcctctggcaggaacggccggagatcctgaagtacatcgccctggtcagcgccttcaacctgctgctgagcgcgctgctggtggtgagtatgccggtgctcatcaaacagaccctggtgctgggggacacctggtacggcctcaaccagaccgccatggcggcagggagcctggccgggggcctgacagcgggactgctgggtccccggctgacagtccgccggtcctggctgacgctgctggcctgcggggtctgcctcatccccatggggctctgcctgctggcaggcgtgggggctgtcgcggcctttgctgtgctgacggctgcgggcttcgttctgatggcttgcgccgcgctgttcaccgtgaccatgctggcccacattcaggctcagacgccggccacgctggtggggaaggtggtatctctgctgctgaccgtctccctatgcgcccagccggcggggcaggctctctacggggtcctgttggagcagctggccgggggcgagggctgggtgctgctgggcgcggcctgcggggccatgatcgtcgctgcggcggcccggcgggtggcttactctgccgcctccggctccagcaggtgcatggcggagacctcgtaggccacccgttcctgggcggtgccgtcctccaggaccttgcggtaggtccggctctggacccggccttccaggctgagcgtgtcccccacctggagccgggccgcctggaccgccagctgtccccaggcaatcaccggcagatagtccgcccggccgtaccggcggctcaccgccagcatcaggtcgcagatgctgcggcccagaggggtgcggcggaagatggggggcttgcacagggcgccggagagcagaatgcggttgcagggctctccggacccgggttccatggcttgggcatacaccgtcagcaccagccgattcccaacgccggagcggttgttgaaggaccgcagctgcccccggacccggagcgggtcctccagccgcaccgcagtcagcagggcctccggcaccagcaccggcagcgtgtccggagtgccggagagccggggcacctgcaggggaaagcgataaaaccgggtgccgtggttttcatgggagagtgcaggcgcctccagagcaatcccctccagcagcacctcgttgcgggtctgagtcgtcatgttgtccacctctcggtcgtgatggtacaccttatgagagccgcggccgggatagacctgaaaatccccggcggcggaacaggtccttgcctccggggcggaatgcgtatataataaagccatgaatccggcggcccaccgccgttccacaaggaggggaagcgatgaaagccattgtctacacatcccagaccgggcacacccagcggtatgcccagatgctggcggaaaggaccggcgtgccggcatacagcctgaaggaggccggaaagagcttgcggcggggcgaggagatcttctacatgggctggctgatggccggcacggtgaagggcctccagagcgccatggaccgctataccatccggggggcagccattgtaggggtctcgcctcaggggaacggcgacctctggaccgaggcccggatcaacgggggatacagcgacagcggcgggcggctgttctatctccagggcggctacgcaccggagaagctgggctttttctatcgcatgatgatgaagcccatggccggctccgttgtccgtcaggtgcaggcccggggagaggccgccacggaccaggagcgccggatggcggagatctttcagcacggcggcgactttgtccgggaggaggcgctggatgagatcgtccgctggttccgggagggcccccacgacggagaggtgaaagcggtccccagcgtggacatttgaacctgacgaaaaaggccccggctgtccaaaaggacagccggggccttctgcatacgtgaacagcagcggaggactcagactctggccacgccggaggcgcgggcggcctgctccacagcggaggccaccgcgtcccgtacccgtggatcgaaggcggcggggatgatatagtcggcagagaggtcgtctcccactagctccgccaaggcatgggcggcggcgatcttcatagcgtcgttgatgtcgctggcccgggcatcgagggcgccccggaagatgccggggaaggccagcacgttgttgatctggttgggatagtcgctgcggccggtggccaccaccgccgcaccgccggccttggcgtcgtcggggaagatctccggcgtggggttggcgcaggcgaagatgacggctccagcgttcatggtctgcaccatctccttggtcacggcgccgggggcggacacgccgatgaacacatcggctcccgccagcacgtccgccagggagccggtccgcttctccggattcgtcacctgggccatctcctccttgatccagttcatgccgtcgctgcggccggcgtagatggcgcccttccggtcacagagggtcacgtcccctgccccggcggagagcagcagcttcgtgatggagacggcggcggcgccggcaccgttgataacgattcggacatcctccagccgcttgcccaccactttcagggcgttggtgagccccgccagggtgatgacggcggtgccgtgctgatcgtcgtggaagatggggatgtcgcaccgctccttcagcttccgctcaatctcaaagcaccggggggcggcgatatcctccagattcacgccgccgaaggacccggccagcagggccacggtgttcacgatctcgtccacgtcgtggctgcggacgcacaggggaatggcgtccacgccgccgaaggccttgaacaggacgcatttgccctccatgacgggcatccccgcctccgggccgatgtctcccagccccaggacggcggagccgtcggtgaccaccgccacggtgttccaccggcgggtcagctcgtagctcttgctgatgtccttctggatctccaggcagggctgggccacgccgggggtgtaggccagggacagcgcctccttgctgtccacctgggcccggggcgtcacctccagcttgcccctccactcggaatgcaggcgcagggattcctttgcgtaatccatgatcggtactcctctccataacgctcaaaagttgtttttattgtacgggaaaagcggacggttgtcaatttccggtgccggcggggcggggaaaatccaagcggtctcttgcattccggaagcgcctgtggcaaaatagatgggacagaaaaggaggcggtttcgtgaagatttcgaccaaggggcggtacgccctgcgcctgatgatcgatgtggcggtccacggcggggaggagttcgtctccttgaaggatgtggccgcccggcagggcatttccatgaagtatctggagcagatcgcgggtctgctgggaaaggcgggattcctccgcagcgggcgtggcgccctggggggatatcgtctgacgaaagcgccggaggagtataccctgggcagtatcctccggctgacagagggaaatctggccccggtggcctgcctggagacggaggagaacgcctgcgagcggtgcggcgtctgcccgaccctggacttctggacgggcctgtatgcggccgtgaacgaatatgtagaccgcttcaccctggcggatctggtgcgggaggaattggagaaacaggggagagcgtcccgaccctccacagactgaatggcaaaacgccggcctcatatagaggccggcgtttgtttgaaaagcaggtcagtccgtcagcccggcgcagtcggcgggccgtccggagagcatctccagcccgtgggcgagcgcggggaggacggcctccaggttttccctggccgccttgggagagccggggagattcacgatgagcgtccccttccggatgcccgccgcggcccgggacagcatggcccggttcgtcacctgcatggaggcgtagcgcatggcctccggaatgccgggggtcagccggtcacacacggcgagggtggcctccggcgtcacatcccggggggcgaagccggtgcctccggtggtgacgatgagatccaccggctcccggtcgcaccactgccgcagggcagcctcgatccggcccttctcgtccgggacaatggcggtctccgtcaccgcgtacccggcgtttttcagaatttccacaaccagaggcccgcccgcgtcagggcgctctccccggaaactccggtcgctgacggtcaggacagcggctttgaacatggtagatcactccttcacgattccagcagcagaatggcctccggcggaacggagacggtgaggcggtccttgtccggcaccgcctgccagttgtccttgtccagctccatccgcagcaggggcgcctccggcgccgcgccctccggccgcagcagcacgatggtggaaaacacgtcctccaccacctttactgccgtgcaggagaaggcgttttccgccccgggaccggccagctgaacatggtgggcccggatgccgatccggcagacgccctccggcaccggacggctgcaggagagcgtcagtccccagtccggaagaaacaccgcatcctcccttggccgggcgtcggcatagttcttgcagccggagagccgggcagcggcctctgtgccggggctgcggaacagctcccccagggtggtcacaggctgggatctgccccggtctatgacacacacccggcggcagttccggaacacctccccccggtcatgggagacccacagcaccgtgcccgggaatccgcccagtgtctctgccagctccagttccagctggtatttcaggtagctgtccagggcggagaagggctcgtccagcaggatggccgtgggctccgacgctaggattcgggccagggcgcaccgctgctgctgcccgccggagagctgccccggcttctggtctgccacggcctccagccggaactgccgcagcttctccgccacctctgtttggcggcgggccttgtcccgcacggctgcggcgatgttctgccgcaccgtcatgttggggaacagagcgtactgctggaacaggtacccgacctgccgccgctggggcggcaggttgattctggaggcgctgtcgtaaagggtaacaccgtccagctcgatgtgtccctcgtccggcgtcagaatgccggcgatgcacttgagggtcacagacttgccgcaccccgaggcccccagcagggccagcgtctcatccccggcgtcaaactggaccgccagatgaaaatttcccagggcctttcggatgtccacggaaagcgccattaccgtctgcccccttttccggcccgtttctggcgggcttccagcaggttcactgccaacaggaatacagcggagatggcaatgttcaccagcacccagcggagggcctctgtgtcattgtcggtccgccagagctgatagacggtggtggagatggtggcggtgcggccgggggtgtagccggcgatcatggaggtggcaccatactcccccagagcccgggcaaaggccagcacagtccccgccaggatgccctggcggcacacgggcatccgcacccgccagaagatccagatattggaccggcccagggtcgccgcagcttccgccagcgtaggatcgaagctctcaaaggccccccgggcggtacggtacatcagggggaaggccaccaccaccgtggcaaagacagcggaccaccaggtcatcaccagcctcaggccgaagtgggcctgcacccaggcgccgatggggcggttgggccccagcagcaccagcagcagccagcccaccacggtgggcggcagcaccaggggcagggtcagcaccacatccagcacgcccttcaccagccggggcagcttggcgatgtagtacgccgccaggatccccaggaagaataccgccaccgtggagatggcggcgatccgcaatgagttgtagagagggtaccagtccatttcaaaaaacctcctggggaaagggggcgtctgccatcccgacccgccagaggcgggccgccgcagaagcggcgtacaagcgttttgcaaagcaaaaccttggagaggccgggctttgcctggccgagcaaaatcaaatcaagggctcccattgggccaaggcccaatgggaacgatggcggcgatccgcaatgagttgtagagagggtaccagtccatttcaaaaaacctcctggggaaagggggcgtctgccatcccgacccgccagaggcgggccgccgcagaagcggcgtacaagcgttttgcaaagcaaaaccttggagaggccgggctttgcctggtcgagcaaaatcaaatcaagggctcccattgagccaagtcccaatgggaacgatggcggcgatccgcaatgagttgtaaagaggggaccaggccataaggttcctttggaaaataagaaatccggagtttggaatgaggggatcaagggctgtcagaaagcattttaaacgatccagccttatcagacgcctatttccaatctgcttgaactcacaccatggggctgaagcctaccgcctcgaagcaggccatggcctcgtcggtcgacaggaagtccaggaaggccttggcagcatcgggattggcgctgtttttcatgacggcggcggggtagatcacctggccgcacatctcagcggtggcctcgtccaccacggtcagaccggcggagaaggcgtcggtggcgtagatcacgccgcagtccacggtgccctcagagacctgggtggtgacctccttcacgttggagccgtaggtcagcacgccggaactggccagggtctcctcattcagaccgtagtaggtgaagatcttctgggtgtactggcccactggaacgtcgctgttgcccatggccaggaacacatcgccgctggccagcagctccgccagctggtcaaaggactcgatgcccttggggttgccctcgggaacggccagggtcaccttgttctccagcaggtccaggcgggtggcgctattcaccaggtccaggccctcggtgttctcctcgccgccctcggcgtccaactggttcatctgcttgggagcggcggagatgaacacatcacagtcggctccctcctggatctgggttttcagggtgccggaggagtcataagtcgccacgacggcgacttccggagccacggccttgtaggcctcgatgacctgatccagggactcctgcatggaggccgcggcaaagacgtgcagctctaccggttcggcggtggtctctgtggtgtcgtctgtggtgctgtcggtgtccgcactgccgctgcaggcggtcagggccagcgccatggacagggccagaacgagggagaaaagctttttcatggcgaaatcttcctttcttgatgataatatgttgaacccggctttgcaagtccggtgtcaaactgacgtgatattcaaatgaggataacggatggaaaaaacctgcgccggacgctccggcgcgggctgatttttactttccaaaggggcagatgggccagcggcagggctggcagccgagacacaggccgccctcccccagggagacgatccactccttggtgacgcttacatccgccgccacccagggcagcactaggtcgaagatggtggccccggcgtacatgacgcagccaggcaggcccatgacgggggtgccgtcatcgtagtagcccagcaggaacatagcgccgggaagcaccggggcgccgtaggtgacgatcttcgccccgctctgcctgatcccgccgggggtgttatcgtcggggtccacgctcatacccccggtgcagaggatgacttccgccccagtctgccgggcttgggagatggcgcctgccacgttctccaccccatcgccggaataggagacggagatggtctcgatgccataggcgctcaatttgtccttcaccaccggagtgaaggtgtcctggatcaatcccttcttcacctcgctgccggtggccacgatggcggcggtttttcgcacccagggccgtagctccagcaggggggtatctccggcggccgctttggcggctgtcagcttctcctccgcgatgatcagggggatcacccgcatccccgccagcttgtcaccttttttgacggctgtacccccttccgggtggcgatcatcagctcatcgatggcgtttaccgcccgcagggattccgaccggaccaggaacagcccgtcgcaggatgccttcagctcgatcttgccctccttgacgccactccgctccatattctcgttggcacacagggccagcaggcgctccgccccctcatcctcgtggagcatcccaggcgtcatctcccacacgtacaggtgctccttgcccatgccgagcagcaccgggatgtcctccggcgccaccacatggcccttgcggaaccgggcatccttgtactggtccttgatgatctgggtcaggtcgtggcacagcacatggcccaccgcatcctccgtccgtatcagcttcatgcttccgcctccagaatctcgatctcatcgccgggacggaccacgccctcccggaccaccacggcgaagataccctccgtgggcatgacgcacctgcccaccgcctgcttgatggcgcagtcgctgtggcactccttgccgatttgggtcacctccacctccgtctcaccgatccgcagatgggtgcccaccggcaggtgtttcaggtcgatgccctcggtgttgatgttctccgcaaacacccccggatccagtgggatggggcagctcgcccgcatggtgtccacgctctcctccgccagcagggagatctgccggtgccagtccccggcgtgggcgtcccccacgatgccgtggcggaactttagttggatttccgggacggggtgcttctgctcccccttccgctcgctgatgttgaccgataccacgtttgccaacaggctcactccttgatctggtaatctccgctcttgccgccggacttggacagcaggcggatgttttcaatgcgcatgtccttttggactgccttgcacatgtcatagatggtcagcgccgccacggacacggctgtcagggcctccatctccaccccggtaacgccggtgcaggtgacggcggcctggatctccaccatgcagggggaatcggacagggcgaaggtgatgtcgatacctgtcaggggcagggggtggcacatggggatcagctcccagttgtgcttggccgcctggatgcccgccacctgggctaccgccagcacgtcgccctttttcaaggtgccgtccttgatgttctgcaatgtctccggggccatgtggatctccccagcagccactgcccggcggtgggtgacggccttctccgtcacatccaccatcctggcccggccctgttcattgaaatgggtcaattccgccatggtggtcatcctccgatctgattcatgtttcggggcgtgtcgctggaccgttctgtgagatggtggcgctccggcttgtggaggatgccccgccggacggcgtcctccagcgcctggccgtggaggccccggagggggatctcttcccggctgtggaggcagcccttcagcttgccgtccgccgtcacccgaatccggcggcagtccgcgcagaagtcgtggctcactggggagatgagccccactgtccccagcgcgccgggcagctggtaccgccgggccacgccctgggcctcgatgggttccagctctgccatccggtccagcaccgtttctgcaggcaggaagcggttccgatcccacccggcgcaggggcccatgggcatcagctcgatgaaccgcatctcccagggatgctcccggctgagattcacaaaatcttcgatctcatcgtcgttgaacccgccgatgaggacggtgtcaaattttagattccggaatccagccgcctccgcagctttaatgcccgcaagcacgtcctggagggtccccagccgggtcatggcggcgaaccggtccggccgcagcgtatccaggctgatgttcagccggtccacccccgcatcccgcaggggccttgccagctggggcaggagggagccgttggtagtgaggcacagctccgccaacccggggatggcccgcagcatccggcacaggtccggcaatccccgccgcaccagaggctccccgccggtgaggcggatcttctttaccccgcaccgaaccgccgccgcggcgatctccgccagctcttcgatggagagaatatcgctgtgaagccgcttctccacgccctcgggcggcatacagtattggcaccggtagttgcacagatccgtgacgctaagccgcaggtagtcgattgtccgtccgcagctgtcccgcataatgtcctccaaccgtgatactcaagtgagataaacgatatactatattataagcgccctgcgggaaaagtcaagaaaaacgccccggccaatgtcggggcgtgaaccgaaaagtatcagcggtgagaggccctccaggcggcagccatccgcaccgacagcgtcaaggcaatggccagcaggatgagggaggcgatgcctgccataagaatcagagccatcaaggcccacatggaggtcacaggaatttccggtgctgagagcaagtcggcgatgggcgcggtcagcaatcggtacgccaggaattcaatccatagcacgaccagaatcactccattccgccgggtgggaggaaaggagaatgtgcagaaggagcggacagtcccaatcagcagagccagtatcatcagcgattggatccacgctgcaaaggtatagacgggggttccgacttcctcccaagagaacgtgaaaaagaaaagattccagctgatgccggtgccatagtagcaaaagattattgtgcgataataggactaaatcagaaagaccttgaaaaccaaggcattctggcttagtcccttctttttttgaccgaaaacaaaggactttcacaataatcaagcaagccggagggtgctgctgcacacttccggcagaaggaggatatagtgggtgctatcaaagtcttcttgaaggaggttctgcttccaatcgcgcttgcgttctgcctcgcgtcatttctcaagccgatctatatgcctgacggcgtatgcgactactttcttatgtggatctgcgttggattaccgttcggcatccggaggatgtgcctctggctcgttcccagcggctacggtatctccggctcagtcggcatcttcgcattgaacttaatcataggcggtcttatcggaggacttgccttcttcatcgggctgctgctcggtgtcattcataccatccgagaaataatctgaactacatcgtaaacgaagagggtttgtttcttctccaatttggagtaagaagcaaaccctctttttttgttgcccaaaagccggaatatttgctggcgatgcggcgaaggaaaggagtttttaagtatgaaacgcatgacagccggtgatctgcaagcactggaattgctgatgcagaccacacccggctttgagcattttgacagcggcgcggatggcattctccctgagtgccgaagctgccgctttcaccgtcctcactggaaatatcaatcctgcgtgtttgcagagtgtccttactgctgcaatcccgtttcaaccctcaaaaatcaaagtggcacatctgctgccggaaaggaagtcagtcatggataacaaaatcgaagtcttcaagaatgaacagttcggtgaggtgcgaacgatcctcgaaggggaaacactcctgttctgcggttcagatattgcgaaagcacttggatatgcccgacccggaaaggcaattattgatcactgcaagggtgtcctaaaacgggacacccttacaagcggtggtatgcagtccctttcctatataccggagggcgatgtttaccgactgattgttcacagcaaactccctgctgctgagaagtttgaacactggctgttcgatgaagttgtccccaccatccgcaagacaggcggctacatgacggactcccttctggaacgtattcagaaggaaccggcggtcattgtggagtttgctcaggcgttgattctggaaaagaatcgtgtgaaggctcttgagtgtgagctgaacacagcgaagcctaaagctgattactacgacgccttcatcaatccggatgactgcaccaatatccgaacgacggcgaaggaactgaaaatcccggagcgcaagttcgtccagtttcttctcagggagaagtacctgttccgctctccctccgggcagcttcttccctacaacaaggacagcaatgccggactgttcatcgtccgcgatttcgtgacgtactgctacaccggttctcagacctacttcacgccgaagggcaaggaggtcatccgagtgaagttccagaaaaagtgcgccgaagagctgcttcccaagatggcaaggtgatttctgtggcagtctatcgcgtaaacaagaatcgcggctatacggtcatggcgaactttcacctccgcgacaagagcctgtcactcaaggcagtcgggcttctctcaaagatgctctcattcaatgacggctggaagttctccaccaagggactttccgcaatctgcaaggaaggtccggatgccattctctccgcgcttcgtgagcttgaaaaacacggctacctcgtcaggcaccggcagagagacggtaaaggcaggatgagcagtacaatctttgagatatacgaagagccgcaggagtccacgccagaacaggaaatgccacacacggaaaatccatgtgtggagaagccagatgtggataatccacgcggggataagtccgcacaaataaatactaatcaagtaattacccaagaaagaaatactctctcaaagaactatcaatccatcaatcttgatgggatggacaggatggatgagcgaagcgagtatgaagagattatcaaagagaatcttgattacgacattctctgtcaggatccgaagttcgataaagaccgcttccgggagatcatggacatcatgctggatgctgtctgctctaccgctccgaccatccgtatcaacggcgaggatatgccgcagcaagtggtcaagtcccgctttctcaaactgaatagcagccacattgagtacgttctggaagcaatgaacaagaatccgtcagacatccgcaatatccgggcgtacctgttgaccgctctgtataacgcctctctgacgatagacaattattactctgcgcttgtcaaccatgatttctacgggcaggacagatcagcagagtcaaagaagcccaagacctacgattatagcctttgtgaagatactttttattgaataccatcgtgagcattgctcggaaaggaggacattgcaaatgaaaatcatctatcgccggattgtgccgccttagctgatgcagcattcccacaatcattccaaggaaaggaggtatcactgcaatgcaggatgaagtcaacaccaaagttgttgcaatcatgatcaagggcggcaaaatctctgccgaggtactgaaaaaggcgctggacaagttcgttcaggaaattgagaaggcacagaagcagatgcagcagcccaaagcctatcgcggcaagcagtccatcaagcatctgatgagccagaacgccgccatctccaacatcgaagtgacggacggcaacatcaagtcctttgagcggactgccagcaaatacggtctggactttgcgctcaagaaggacgtttccgttgagccgcccagctatcttgtcttcttcaagggacgggacgttgatgttatgaccgccgcgttcaaggagttctccgccaaaaccgtcaagcagaaggaacagccgtccatccggcacaagctggatcaggagaaagctcagagcaaggcgcagcacaaggagaaggtcaaggtcaaaaccaaggatcggggtgtggagctgtgaacaaacccgatgtgaagaagctcgttcttctgaaccttccgtatatcttcgccttctactttgcagataagatcgccgccgtgttccgtctcgcacccggcacagagttcatcgacaagctgacaaacggttttgccgtgttcggcacagccttcgcaaatccgctgcccagctttcagcccgtcgatctgctcatcggtctgattgccggtgcgctgctcaagttggcggtctacgtcaaaggcaagaatcgcaagaagttacggcagggcgaagaatacggatctgcccgctggggaaacgaaaaggacatcaagccgtacatggacccggagttctccaacaacgtcattctgacgcagacggagttcctgaccatgaacagccgcccgaagcagccgaaatacgcccgcaacaaaaatatccttgtcatcggcggttccggctcaggtaagacacgctttttcgtgaagccgaacctgatgcagatgcacagtagctatgttgtgactgacccgaagggtacggtactggtggagtgcggcaagatgctcgaaaagggcggctatgtcatcaagtcgctgaacaccatcaatttccggaaatccatgcactacaacccttttagctacatccgcagcgagaaggacatcctcaagctggtcaatacgatcatcgtcaacacgaagggagacggcgataagtccggcgaagatttttgggtaaaggcggaaaagctctactacacagctctcatcggctacatctggtacgaggcacccgaccacgagaaaaactttactaccctgctcgaaatgatcaatgcctcagaagccagagaggacgatgagaccttcaagaaccccgtggatgtcatgttcgatgagctggaagcccgcgatcctgaccactttgcggtcaagcaataccgcaaatacaagctggcggctggcaaaaccgcgaagtcgatcctgatttcctgcggtgcaaggcttgcgcccttcgacatcgcagagctgcgggaactgatgagctacgatgagatggagctggacaccatcggagaccggaagacggcgctgttcgtcatcatttccgataccgatgacaccttcaatttcgtcgtggcaatcatgtattcccagctcttcaaccttttgtgcgataaagcagatgacgtttacaacggtcggcttcccgttcatgtgcgctgtctgctcgatgagtttgcgaacatcggtcaaatcccgaagtttgataagctcatcgccaccatccgaagccgggaaatctcggcgtcaatcatcttgcagtcccagtctcagctcaagaccatctacaaggacgcggcggacaccatcacgggcaactgcgactgcacactttttcttggtggcaaggagaaatcgaccctcaaggaaatcagcgaggtgctgggcaaggagacaatcgacctttacaacacctcagaaacccgttccagcaacaactcctacggcttgaattaccagaaaaccggcaaggaactgatgtctcaggatgagatcgccgtcatggacggagccaagtgtattttgcagcttcgaggcgtgagaccttttctcagtaacaaatacgacattacgaagcatccaaagtaccggcagctctccgactacgacaagcggaacgcctttgacatcgaggagtatcggcagcacaagctggtagtcaagcccgatgacacattcgacctctatgatatgggcgaggtcgaagcggattaaagccccgtcgctgcactgcgcagtgggtaaagcctgatggctcccaaagcagaacagcgccggggcttctttttttatgcccattttcaaaaatacacaaccaatctttttcaaatcaaggaggaaaatctatggctttcatcaatcaggctgtcacggttcttcagacgctcgttatcgccctcggtgccggtctcgcggtgtggggtgttatcaacctcatggaaggctacggcaacgacaatccggcggctaaatctcagggcattaagcagctcatggctggcggcggtgtggtgctgatcggcacgaccctcatccccctgctctccggtttgttcggctaatccacggcaagcccagcttaaccgaagggtggtgaaatattgggcagcattttagaaaagatcgaacaggctctcaaggatatgctgatcggatggatcgagagcaacctgaccaatatgttcaccgatgtcaacgagaaggtgggaacgattgccgccgaggtcgggcaaacaccgtccggctggaacggcggcgtgtaccagatgatccggggactatccgaaaacgtgatagtccccatcgctggtattatcatcacctttgttttgtgctatgagctgatttccatgatcaccgagaaaaacaaccttcacgacatggacacttggatgttcttcaagtggtttttcaaggcggctgtggcgatctatctcgtgacacacacgtttgacatcgtgatggcagtattcgacatcgggcagaacgtggtttccggtgcagccggtgtcattcacggcaacaccagtattgatattgattcgacgattgcgcagatgcgtaccggcatggagaacatgggcgtcggagaactgctcggactgtcgatagaaactcttctgatcagcttgtgcctcaaaatcatggcgatcctcattacggtcattctctacgggcgcatgattgagatttactgcaccgtgagcattgcgcctattcccatcgcgaccatgagcaaccgcgaatggggcagcatcggcacgaactatctgaaaggcttgttcgctctggcatttcagggctttctcatcatggtctgcgtcggcatctatgcagtgctgatcaacggcatgatcatcgcagacaacattcattcggctctgttctctgtggcagcgtacacggtcattttgtgcttctccctgttcaagaccggaagcctcgcaaaatccattttccatgcgcactaaggaggtcggcagcatgaagaagtacagcatcatctacgccgatcccccttgggcgtatcggacttactccaagaagggacagggacggtcggcagaaagccactacccaacaatgtgcattgaggacatcaaggcacttccggtcggtgagcttgctgcgaaggactgcgccctgttcctctggatcacgttcccgtgcctctgtgaagcactcgaagtgctgacggcatggggcttttcttataagaccgtggcttttgtatgggtgaagcaaaaccgcaggaacgacgatctcttcaccggcatggggtattggacaagggcgaacgccgaaatctgcatccttgccacaaaggggcacccgaagcgagttgacgccggtgtgcgtcaggtcatcctcagccacatcgaagagcattccaaaaagccggatgaagcgcgggaacgcattgttcggctcatgggagaccttccccgcgtagagctttttgcccgtcagtctcccgaaggctgggacgtttggggcaacgaggtcgaatgcacggcacatcttccaatggaggaaacaccatgctgcggctaagacctatctctcttcgagacgccaacgagtatgtccggaagcatcaccggcatcacaagccggttgccggtcacaagttttccatcggctgtgaagcagacggtgagctggtcggtgtaatcatcgccgggcgtcccgtcagccggtatctggatgacggcttcacattggaggttacaaggctatgcaccaacggggcgaagaacgcttgcagctttctctacggcgcggcggcaagagctgctgcggctatgggctataagcgcatcatcacctacacgctggaaagcgaaaacggtgcaagccttcgggcttccggctggatctgtcaaggcaaagcgggtgggcttcgctggacgggcaagcgtcagccgaaggaggatcaatatcccgcacaaatgaagctgcgctacgaaaggcagcttagaaaggaggaaacagtcaatggcatttgttccggtcccgaaggatcttaaccgcgtcaaaacgaaggtcatgttcaacctgaccaagcggcagctcatttgtttttccgtcgctgcggcagtcggcgtcccgatcttctttctggcgaaggcacatctcgacttgtctacggcggcaatgctgatggtggtcatcatgctcccgttcatcttcttcgcgctttacgagaaggacggtcagcccgccgaaaagtatctgtaccacatcgtacagtccatgtttatccgggacaaggtgcgtccctatcgcacaaacaatctctacgctgaaattcagcagaaaatcaaagaacaggaggaattgcagcttgaacaacagcacagcaaaggcaaagcctaagatgacggtcaaaaacggcgtcatttacggcgatgccctttccgctcaggaaaagaagcggattgtcatgcagaagaaaaaggataggaaggcaaagaaagtccgcaagtccgcccagcagaccattccctatgtggaaatgtgccgcgacggtatctgcaaggtgaacagccgcctctacacgaagtccatcgcctttgaggacatcaactaccagcttgcgcagaacgaggacaaaactgccatcttcgagaactggtgcgatttcctgaactactttgacagctcgatctttgtccagctctccttcatcaatcagaaggcaagtctcaatgagtttcgcaagcgcatcaacattccggcacaggaggacgccttcaacgacatccgctccgagtattccggtatgctgcaaagtcagctcaccaagggcaacaacggactggtcaagaagaagtacatcaccttcggcattgaggcggactccctccgcacggcaaagccgaagctcgaacgcattgaaaccgacattctcaataacttcaaaaccctcggtgtgagaaccgagccgctgtccggctacgagcggctgaaagtgcttcatgacgtattcaacatggacaccaatgagccgttccgcttttcctttgacatggttgcccggacaggactcagcacgaaggatttcatcgcgcccacttcctttgacttccgtgaaggcaagtgcttcaagatgggcagaaccatcggtgcggtgagctttctccaaatcctcgcgccggaactcaatgaccgtatgcttgccgacttccttgagatggacagcaacatcacggtcaattttcatatccggacgattgaccaggcaaaggcaatcaagagcatcaagatgaagatcaccgacctcgacaagatgaagatcgaagagcagaaaaaggcggtccgctccggctacgatatggacatcatcccgtccgatcttgccaccttcggcggtgaggcaaagcgtctgttgcaggatctccagacccgcaatgagagactgttccttgtgaccatcctcatcatgaatacggcaaccaaccgccagaagctcgaaaacgcggtgttccagaccgccgccattgctcaaaagtataactgtgcgctcaagcgtcttgacttccagcaggaggaagggctgatgtcctctttgcctatcggcgtcaatcaggtggaaatcgaacgaggactgaccacttccagcacagcggttttcgtgccgttcaccacgcaggagctttttcagggcggcgaagctctctactacgggctgaatgcgctgtccaacaacatgatcatggtggaccgcaagcagctcaagaaccccaacgggctgatcttgggtacgcccggttccggtaagtccttctccgccaagcgtgaaatgacgaacgccttcctcatcacagaggatgacatcatcgtctgcgaccccgaagccgagtattttcccctcgtgcagaagctcggcggtcaggtcatccgcatctcgccggtcagcacggattacatcaatccgctggacatcaacacgaactactccgaagaggaaaacccgctgacgctgaaatccgacttcatcctctctatgtgtgagctgattgtcggcggcaaggacggcttgcagccggttgagaagaccatcattgaccgcagtgtccgcatggtctatcaggagtttcttgcagaccccaagccggagaaaatgccgatcctcgaagacctctacaacattctgagaaatcagaaggagccggaggcacagcgcattgcaactgcccttgaaatctatgttcacggctctctgaacgtcttcaatcacagaacgaatgtggatgtcaacaaccgctttgtctgctatgacatccgcgaacttggcaagcagctcaaaaaactcggtatgctgatcgtgcaggatcaggtgtggaacagagttaccatcaaccgcgcccagcacaaggcaacgcgctactacatggacgagttccaccttttgctgaaagaggaacagaccgccgcgtacagcgtggaaatctggaagcgtttcagaaaatggggcggcatcccgaccggaatcacgcagaacgtcaaggatcttcttgcctcccgcgaggtggagaacatttttgaaaactcggattttgtctaccttctgaatcaggcgtccggcgaccggcagattctctcgaaggcgctgaacatctcgcccagccagcagaactacatcaccaattccaatgccggtgaggggctgatcttctacggctcgaccatcgttcccttcaaggacgatttcccgaaggacacccagctctaccgtatcatgaccacccgtttagaagaaaccgtacagaactaaggaggatttttgaatatgaacaacaagatgattaccattccctacgcggacgctatcgaatacggagagaacacctccgcgctgtttaaggctctgtgggagctgaccgatctgatccgactggaaagcgacctcaagaagcatcaccgcgcctatctccatgtgagggaggacatcgacgaaaaggtcaaggaagcgcgtcagattatgaccaaagtagccgtggatatgatcggcttttacttcaatgttgatgtttctgagtgcagcaacaacgatgagaatacccccttcgctgacgcggcggatgatgaaaccgtttctatccccaagggcgagtatgagctgatgatcgacgatctgctcacgatgtccgaaatcattcagagcgtcgcagatatgcgcacgcaggatgtgaaggcaatccgcgagttcggcaagttcgtccccgcctttgccgcctttgagaagaaccgcctgagcctctaccgcgacgcggcgaaggaagcagaggaaatcttcgaccgttgggcggacgagattgacgatctcgacgaggacttcatggaagacgaggactacgagccggacgagtattactccgattgatgcccattgaaatgttatcgggttttacagccaacatttcaacggaaacgcaaatccaacagaacaggaggtacaccaccatacaacttgacatcattcataccggcgattgccttaaaatcctgaaaactctgcccgatgacaccgttcattgctgtgtgacgtcccctccgtattacgcgctccgcgattacggcatggaggctcagatcggcagagagacaacgccgaaggaatatatctcgcgcctgacggaagtgtttaccgaagtcaggcgcgttttgcgtccggatggaacgctctggctgaacatctcggacacctacgctggaaagggcaatcagggagatttcattgacccgaagaacccctacggcagaaacggtcaggctgtggctctcaacaacaaggttgagggctgcaagccgaaggatatgatcggcattccgtggatgctggcttttgccctccgcgataccggctggtatctgcgcaacgacatcatctggatgaaggataaccccatgccggagagcgtgaaagaccgctgcgcccgctgttatgagcatattttcctgttctcaaagtccaagaagtatttcttttactacaaggcaatctccgagccgattgcctctgcaacggcagaacgtctcaagcgcggcatgaggggcggcaacaagtacggaaagcccgttcccggtcagcctcagccgcagtccatcaaccgcccccgcgagcatggtgagatcaaggacagtgacatcaatccgctccgcaacaagcgcgatgtctggaagatcaacaccgtccccttcaaaggcggtcactatgccgcctaccctccaaagctggttgaaacctgtcttctcgccggttgtccagaaggcggcattgtgcttgacccctttatgggaagcggcacaaccggcatggttgccgcgcagatggggcggcattttgtaggcgtagagctgaacccggaatacaccgagcttgcctacaagcggattggaggtgaaatctgatgtccaaggaaccggaactcaaagcccgtgacaaggtggtcgtgcggatgacgcgggaaggcgcggttgaggaaaacctgacggctggcaccgagcagcgtgtgtcaaagaggctggaagatgcggagctggtgaagcccggtgagacagtcgagccttccgaagctctttctgcggaggaacagaaaaaggtgcagatgcgccgtcagcagcgtcagtttcaggcggaacacgccgaggataacgacacacagccgccctcggaaacgtctgtcacagaagagaaaaggacagaaactctaccccagaatgtacccgaaccgctgccttcggaaacgccgttcaagcctcctgttttggagcagcacggtgtttcttctcataccggcacggtgattgccgaaacggttgtcacgcacaagctacgcaagacctctgcggttgaagccgttgacgcggatgccgttctctcccaagcggcagagacttcctccgcaaagccggtctcggacgatgccgtcccgcccacgaagcggattcagaagctcgaaaggaagtccgaaaaggcgcatgagcgtctggacgctgcccgccagaagctgcccacgcacaaggttctcaagaaagagcgtgtctttgatgaggaaaccggcaagggcaaaacccgccttcattttgaggatgagctgaaaaagccgaagggcaagggcaagctgcaattcgaggcagacaaaaccgtccgcaaggtcggtgacactctcgcctccggcattcacggcaaaatccatgaggtcgagcaggaaaactcggcggtcgagggggcgcacaaaacagagattgtcgcagagaccgccgcaaggcatttcagtcatcacagagaaaaaagcgtcaacaagccctatgagaaggtttctaagctggaacacaaggcggatgctgctgatgcgaagctccaatatgagagaaatcagcaggagcatcctgagatgaagaagcagaacatgaacaagcactatcagaagcagaacatcaagaaggaatatgccgccgctcgaaatgccggttctcagactgccgggactgccacaaagaataccggcaagaagctcggtgaaaaggtgtccgacaagatcaaggagttctttgagaagaacaagaaggtcttcatctggatcggcgtcggaattgcccttctcgtgttgctcggtgctggtatcagctcgtgttcgatgctcacctctaccggctcgtcggttatcgcttcctcttatctcagcgaggatgacgcgatgctgggtgcggaggcgcagtattgccggatggagcaggagctgcaacgctatctcgacacctacgaaagcactcacagctacgacgagtatcacttcgatctggacgatattgagcatgacccctatgtgctgatctccattctctcggctctccatgagggcgagttcacgctggatgaggtgcagggtacgctccaaatgctgtttgaaaagcagtatatcctcaccgaagaggtctttgttgaaaccagataccgcacggagaccgacacatggacggacgcagacggcaacacgcacacggaaacctatcgcgtcccgtatgactactacatctgcaacgtgaagctcgaaaacttcaatctctcccacgtcccggtctacatcatgtctcaggaacagctctccatgtacgcaacgtatatgtcggtgctgggcaaccgcgaggatctgttcggtgactctccctatgtggacaagtacatcaccaatcctcccgccgactacgatgtcaacccggaatacctgaacgacgagaagtttgcagcgctgattaccgaggcggaaaagtatctcggctatccgtatgtgtggggcggctccaatcccgacacgtccttcgactgctccggcttcgtcagctacgttctcacaaacagcggacttgtgaataccgggcggttgggcgcacaggggctttacaacatcagtacgccggtttcaaaggcaaatgcacagcccggtgatcttatctttttcgtcgggacgtatgacacccccggtgtgtcccacgtcggaatctacgtcggtgatggcgtcatgattcactgtggcgatcccattcagtacacatccatcaactcttcctattggcagcagcatttctacgccttcggaagacccgcctattaaaagaaaggagttttgcatgaatcccaagtatcagaaagtcctctccgacattgagaaggctgaaaagaagaagtccgaaattgaaggacagctcaaggagctgtacgacaagaagacggagctggaaaaccttgaaatcatcaataccgtgcgctctatggtgatggacaaggatcagatcatggtgttcctgtcttccatgaagagcggcaccaagcccgctgaaaatacggaggtaatcgacaatgcgtaagaagtttcgttttctgaccatccttgcggtctgcgtcatggttctgtcctgcttctctgtcacggcgtttgcctacgccgatgataccgagcagaaccttcccgttacggaggcaactcagcccgaacagcagcccgcagtcactcccgcgccggaaaagccgaagggtgagccgattgacgatgagggtaacgcctacacccgcgacttgctctatgacaaggcaaccaacaagcagttcatcactgtccagacgaagaacggcaacaccttcttcattgtcatcgactacgatgcgcccatcaacgaggatgaggaacagtatcagacgtacttcctcaacatggtcgatgagagcgatctgcttgcactgctggatgaagatactgcggctgcgctgaccacctgtaactgcaaagagaaatgcgctgccggtcaggtcaacaccgactgcccggtctgcaagaccaacatgagcgaatgcgccggcacagcccccgttacacctgagccggacaaggatgcagaaaccgacgttcctgctcccaagcccgaaaagaaatccaatgtcggtatggttcttatcgtcttcgtccttgttggagctgcgggcgcggcgtattactacatcaagttcgtcaagggcagaaagcccaaggacgaggatctggacttcttcgacgatgaaggctacgaggaagagccgtacatcaacgaggatgaagagccgcaaattgtggtagacgaggaaacggacggtgatgaggattgatcttagtcattgctgaaaagcccagcgttgcccagtccatcgcaaaggttctgggcgcaacgtcccgaaaggacggctatatggagggcggcaattacatcgtttcgtggtgcttcggtcatctggtggagctggcagacgccagctcctacgatgagcggtatgccaagtggcggtatgacgatctgcccattgttccggaaagctggatgtttgaggtcacgaaggacaaagcacagcagttcaaggtgctgtccgctctcatgaaggacaagcgcgtcgccgagctggtctgcgcaaccgatgcaggacgcgagggtgagctgatcttccggctggtctacaacaaagccggatgcaccaagcccttcaagcgtctgtggatcagctcattggaggactccgccatccgcgaaggcttcaaccatctccgggacggcaaggaatatgaccgcctctatgaagcggcactcagccgctcgaaggcggactggattgtcggcatcaacggcacccgcctgttcaccacgctttatcacaagaaactggtggtcgggcgcgtccagacgccgacccttgcaatgctggtggagcgcgacgggaaaatctccacgttccaaaaggagaagtatttcaacgtccatgtcggcaagggcgatctgaccgccgatctggaaaaggtcaaaaccgaagaggaagcaaagaagattgcggcggcttgcgagaaaaagcaagccgtcgtttcttctctcaagcaggaaacgaagaccgtcaatcctccgaagctctatgatctgaccaccttgcagcgcgaggcaaaccgatactacggttttaccgcccagcagacgctcgatctcgttcagacgctctatgaaaagaagctcctgacctatccgcgcacggacagtcagtttatcacggacgatatggaagacaccgcccgtcaggtcatttctattgtctgccgccagcttccgcttttctccggcgtttcggtcactccggacattgcccgcgtaaccgacaacagcaaggtcacagatcaccatgccattctcccgaccgtccagcttgaaaagcaggatgtttcggcgcttcctcagtcggagcagaaaatcctcaatcttatcgggatgcgccttctgtgtgcgaccggcgagaagcacacctacgcagaaacgcagatctcgctctcctgcgagggctacgagttcaaagccaagggcaagaccgtcgttcaaaacggatggaaagccattgaagagctgtttaaggcatctctcaagacgaaggaaaaggacgatcccatgaagtccctgcccgaagtccatgagggcgatgttctggataatgtgtccgccagcgttacggaacacttcacgacgcctccgaagcagtacacggaagacacgctcctgtctgcaatggagactgccggaaacgatcagttcgacgatgacaccgagaagaaaggactcggcacacctgcaacccgcgccggtatcattgaaaagctggtgaaatccggctttgcagagcgcaaaggcaaatccctcattcccacgaaggacggctgcaaccttgtctgtgttctgccggaacagatcacatctcccgcaatgacggcggaatgggaaaacacgctcatggagattgaacgcggcaaggcagatgcggacgccttcctcagcggcattgtccggatgaccggggatctcgtgaaagcctatcccttcctctccgatgccgaagcccagcgtttcggcacgggtaaggaggaaatcggcaaatgtccccgctgcggctctccggtctacgtcggcaagggcaatttctactgctcgaacaaggaatgctccttctgcctgtgggaagacaacaagttcttttccagcaagaaaaagaagctgaccaagaagattgcaaaggagctgctggacaagggctggtgccgcgtgaccgggctttacacgccgaagaagcctcagctctacgatgcggtgatccggctggatgacagcggcggcaaatacgtcagcttcaagatggagtttgatcgatgacccgcccaaagtatgttgcttcatgcagcggaggcaaagacagcgtagcgacgctcctgctggctgcacagcacaatgagccgcttgacgaggcggttttcagtgaggtcatgttcgacaaagacacaagcggcgaagtcccggaacaccgggacttcatttatgaccggctcaagcccttctgcgaaaaggagctgggcatcaagtttaccattctccacgcggacaagacctacgatgaggtgttccatcatgtcatcacccgcggaccgcacaagggcgaggttcgcggctttgcatgggctggtatgtgtgcagtcaatcgtgactgcaaaatcccgccagtccgcaagtacaatgccgcactctcaccggacactgtgagctatgtcggcatcgcggaggatgaaccaaaacgacttgcgcgtctggacggtgtgaagaatgtcagtctgcttgccaagcatggcatgactgaggttgacgcctacaagctctgtcaggaacacgggctgctctctccaatctacgctcactgccggaggaacggctgctggttctgtcccaacgccagtgactcggagctgctgcacatggtcacaaattatccggagatgtttgaccggctgattgaatgggagaaggaagacaacatattccatcgtcgaatgacacgcagagaaaccccgtctgaggtaaaggctcgtttactgagcaaatcccagacggggttttcttcgcccaaaagcaaataagaaatggaggtttgagatggctgaaaacaaaaatgcacagcaagtccgcgaaatcacggacaagctggaacagggcatcaaggagctttttgaatccgagcggttcaaggaatatctccgcacgatgtccaagttctacaactattccttcaacaacacgctgctcattgcgatgcagaagccggaggcaacctatgttgccggttatacctcgtggcagcgcaactttgaccgtcaggtcatgaagggcgaaaagggcatcaagattcttgcacccgcgccgtacaaggcgcaggaagagcatgagaagattgatcctttgacgcagaagccggtgatcggcgcagatgggaaggctgtcacggaaacggttgaggttctgcgtccagcctttaaggtggtgagtgtctttgatgtttcccagacggacggcaaggagcttccggacatcatcgtcgatgagctgaaaggcaccgtcgaaaactacgaggcattcttcgatgcgctcaagcaggaatctcccgtccctatttcctttgaggacattccgggcggtgcaaagggattcttctcgccggttgaaagccgcattgccattcaggagggcatgagcgaaatccagacggtcaaaaccgccattcacgagatcgcccacgcaaagctccacgccgtcaagccggatgaaaaagccgcgccagaagataagaaggatcggcacaccaaggaggttgaagcggagagcgttgcctacaccgtctgccagcgttacggcattgaaacctcggactattccttcggctacattgccggttggtcatccggcaaggaaaccaaggaactgaaaagctctctggacaccatccgcaagacggcggctgagatgatcgagggcattgacgccaagctcaaggtgctgctggcagagaaagcacagtccgtcgagcaggaagctgttccggagaaaaaaccggaagcccccatttaccgcgagacggcgaattacgcctatgaagccggtgagctggagtcatatcgtgcttctctcgccgcaaacgtggaatgccgcaaagcgattgaagcggcgatcagctccaactacggagataaccggctggatgcggatgctgccgtgaagagcgtccttgagcagttctctccggagcgcgtccggtatgtcctcgcaaacaccattcagcagaaagactttgacggacgtattccgcagcccctcaaggaatgggcgaagagcgttgatgtctgccccgaaaacgcctcccgcttccttgtggataaacccaatcccggactgaccgcccttttcgtggatgcgttccgtcagcagaccgaaccccagaaggaagtcatgcctgaaaaaacagaggaaagtgacccggaggttgttgcatgggagaatgatgagattacctctattgaggtaaaaaccgtggaggtcaagtctccctttgcccccttgccggaggaagcagcaaaagcaccgaagacacaccgcctgactgccgaagaaaaggagatcaaagccgccgtcatggacacgctcaaggggcagatcgcctataacaacgacggtatgcgggcgtcctatcgcgcctctaaccattccttcaatctgctggcacggaacggcgtcaggatcgagggcaacacggttacgcagaatggtgagccgctgttcaaaatccatcgccgtcatgcgacgcggaaaacacagggctgctatcgtgagctgatgccgacgctggaatacgtcaagcaggagcagaagcaggaaaagccctctatccgcgatcagctcaaagctgccgcgaaaacgcagccggagaagaagtccccggtcaaatccaaaacacgcgacatggagttgtgagaaaggagaagcatgaagaaatacacagacgttgacatcgttgcggagctgcagaggctcgtggacagtcatgtagacagctacaaggaagacttcgacatcgacaagcgcatcatccgccgcgctgccgaaagccggaatcccgaagagaaaacgctgatgtggttctgccgtccgcatggaacgcactgcctcaatgaaaatcaagtctttattcagggaacgcgagatcacaacaccttccgtttttacgcggaacagacctacgacgagtgcattgctcgtgtcattgtcccgaaagccgttaagcgcggcaaggtcttcggagatgtctttgagatcaactaccgggaacaggcggcaaatgtggcgcagaactcggttgcgccggatcacgaccggctgacctttgcagacggctttgtgctggaagccccctgccgcagcagcttcgatgcagcaatggctctgatcggtgagcatggcggcgtcaagacccaccagacgctcccgaaggacgcggatgctctggtggaagtgctgtctaagcagaaaagccgccgtgtcagactgccggaggcagataggacagaggtgctttcgccgctccccgtcgcagaactccgcaaatatgaggcagtcaaaaaggctcatccggatgcgctggtctgctttgctcagaacggctattttgagctgtacggcaaggacgcaaagaaagccgcgccgcttctcggcacaaaactccttgaaaagaaggtgcgcggcaagccttccgtgccggttactggtttccgtgaaagcgcatgggtagccggttctcataagctctggaagtccggcgtggatgtctttctcagcaaggacggcgagaccttcaaggaactcaaagccgcagattacattcctgtcggcgcgacgctgaatgtggatggcatcaagtgcagaatcgaagcggttgattttgccgctgatgaagtccggctgacgaacatcgaggacaagaaccgccccatccgcttttcggaaagcatccagtatgtccgctcctatgtggaagatgccggaacagccatctacgacaccatcccgaagaagcccactgcccgtgaatccatccgcgacaagctgaaatccgcgcagaaaggacagccgccccacacgccgaaaccgcagaaatcaaaaggaaaggatatggaactctgatatgaaaaactttaccgtggaagaaatcaacctgatgtgctgcttcaacacgtccagccggaagcggctgattgacgatatgaagagcgtcactctgaacgacgtggacggtgagatcgcggagctgatgtacaaaaccgtccggaagctcgaatccatgagcgacgcggagtttgaggaactgtatatcatgccggacggcatggtagatgactgaaaggaggatgcctatgcccgtattagacggtgattttgaagccttcgtcacaaaccttggcaagtacaacgagggtatgctggtcggtgagtgggtaaagctgcccaccaccgaagaagagatgcagaaggtctttgagcgcatcgggatcggcaagcaggatgagttcggtcagccctatgaagagtggtttatcaccgactacgaatgtccgatctacggtgttcagaagatgcttggcgagtacgagagccttgataagctcaactaccttgccgctttgattgacgagctttccctgagcgatcaggaaaagctcgttgccattatggaggctggctgcgatgaggtcagcgacatcgacgatctcatcaacctgacgttcaatctggactgctacgacatcatgcccggtatcaacgacgaatccgacctcggctattattgcgcccacgaagccggtatctactctgaaaaggatctcggtcctctggcaaattacatcgactatgaacgctatgggcgcgacattgcgatggatgagcagggacgcttcaccgacgagggctatgtccgtgttgcaagcgaacgctgggacaggcagtttgacggtgagcttgatgatattcccgacgaataccggattaccggctcaggagaagccgccgagcatgacagcaccatcgctgttcttatcgtcgagccgggaaaggagccttatgtgaaggagattgactccggtctggagtccttgcagcatgaggtcggcggctgcatcgaggcgatttacccctacgaagacccggttgccttagtctgtaatgaggaaggcaagctggaaggtctgcccctgaaccgcgctctgcgtgatgaggacggtgacatctatgacgttgttgccggaacattcatggtagtcggcttgacggatgacagcttcggttctctgaccgtagagcagatgcagaagttctctgacctcttcaaagtgccggaacagtttgttaagttgggcgataagattgttgcgatccccatgatctcgaaggagcagcagaagcaggaagctaccgagcagaaggactttgagatgaatgccgacacctccggtctgacggttgccggtcacatcgggacatggcacaccattgaccggcatgaagtcggcggtcacggcttttaccttatggagcatgacacctacggcgatgaggctgcctgcatcattgtcgatgagcgcggcaagctcgtccttgatgatgtctacaacggcttcgacgatgacacgctccgccttctcgaccttgaggtcaaggaagtgccggaaatgcccgatcctgcgctctccgttcaggatatgaaggactacggctacgcatgggctggcgtcctgcccgccggtcaggacgcggctgaaaaggcgatgaagaagggctgcgaggtttaccgtctctattcggataacaccgagggcttgtgcgtggatgcaaaggagattgccgaccatgcggcaaagggcggaatgctcggtatcagcaaggaaagctggatggcggctcttgagaaggaaaactatctcaaggcagcggagatgtcgatggaggatgactacggcatgattgacgggatcatcaacaacggtccgaaggaggacaagacccttgatgccaaagtccccgaaaggggcgagaagtcctccatcatggacaggctcaagtctgcaaaggctgaaaagcagaaggaatgctgccctcccaaaaagcacaaaggagagattgagttgtgagcagaagtcagaaatggaggcaggagtggtcgttcttcatcggggacagcggacgccggaagtataaccgcttttgcgtccgctgcgtccatagctgcaagcagagtttccgtgcggatctcatcgcctgtccgcacttctcccgcaaggcatcgaggtgtagacagttaggggtcgaaaaagcctgtgattgcaagcctcagagcgacgcaaattgaccagcctaagtgattgtattccctgcgcagtttcttctttagcgcggaaataagtgtcgatttcggcacttgtttgaatgcccggaaaacgaaccaagagcctctgtcgatgcccgttttgggtgtcggcagaggctctttttttatgacatattcaaaatagcggacagcaactcttgaacctgttgccggtattccggctttatatccgaaatacgtctggcaagcgcaagggcttccgtttctggctcgtcggtcccaaagataattcggtccgcactgacgcccagcaaacggcaaagacgctgcaaggcttcaagagaaataccggaagcaccacgctcaatagcgctcaggtgattcggcgtcatgccaagcatttctgagagcgtgtcctgcgtatagcccgcctgttctcttgccacttgaatattgccgccgatttcaatattgatgtccttcttctctcgcatagcctcaccacctttgcatttagtgtacctaacggcggtgtcattatccacggtacgccgtcgttgattttgctaacgacaatgcgttgactgtccgtgatgagggtgatagaatggagttacctaccaaaagagtgaaagaaggggtgtcatgtcacgcattattgagtttagaaagtctgctcaaaaagctgcaaagcaatccgttcaaggcaagacttgtgcgtttaccggtcatagaccgcagagtcttccgttcggctttgatgaatccgataagcgttgtacttctttgaaatctgttatgcgggatcagattgtagcactcatcgagaacgagggcgtcacgcattttattaccggcatggctcttggcgtcgatatgtacgctgctgaaattgtactcgatttgaaatcaaaataccctcacattactctggaaagtgcaatcccttgtgagacacaagcgatcaaatggtctgtggcttcacgggaacggtattataatatcgcggcaaagtgtgacaaggagaccatgctgcaacgggagtacacgacggactgcatggacaagagaaatcggtacatggtcgatcacgccgattatattctcgcagtatggaatggatgccccagcggtaccgggaacaccgtgagatatgcccacaaaaagggcaaatctatcatcgttatcaatccggtttcccttgatgtcacgcgggaataaggcaaaaatcccactcctgaatcaagagttgtgaaaaccgtgaagtatttcccgatagtgaatacacattgcactactcggtgattattggaaacgtgtacggcgtatgctgcccagtgaacatctccacggaacacatcgaattttcacggcttcgtaaaacggaaagtgtcaccttatgaacagtcccttgccgagagaaaaataaatcgctggaaacgggaacgcccccggcactgtgcgtctggcacagtgtcgggggcgtttttccgtgtcttagttatgagccagttcatttaggagcagctttcgatagtccacatccaagacgcagcgatggaagtccatcagacggtgttcgtcgaacagcttttcacaaagcttggtcagcggatgattcatcagctttgcagaaatgccagtctcgttgaaaaaccttgcccatgtgaagacctcttctaaatcctcctgcccaagcgtggcaggaatgatggcgttgcagagacggacaatggggctgtccgtaaatcgctctgcgacttcctccggtgtgcattcatagcggtcacagtcaaaggaaagcgcatcctcaatttttagataattttcgatttcatcccgcgtcaaggttatggtgtagtctcccataccggacggcacatcaatattctccatgacatcaagttcgtaacgggatccgccgatgatcgcttcaaaggagaaggactgacagattactgctgggtttttgtctatcttgtcctcattcagaaaggacagcggattatactccgtcagttcccagtcgatttttcctctctctgtttgctcggcaatctgctggatcagatgttgttcttcttcgtgcagattttcattgtacaacatgatacacctccgttttctgattgtcgtttttttggggggggctgctctatgtttccgaagagactgccgtttgtatcatcattccttggctgagggcagaccttcgtaaaacttcctcagttcgtccaaactgcttgtccgatttttgataggcagtgagtcccatgtaatgtcatgatagcgttccggcggctcgtcccgcagtcttcggtcgataatgcagacaatgccggtgtctgtgaaattgcggatcaatcgcccgataccttgcttgagcttgataatcatttcgggaacgcggacatccatcagagcgtcctttgcgacggaacacttatactcgataattggatcggggacagggaacggaagccggaaaatgatcacattggaaaggctttttccttcaatgctgataccttcccaatatgcgcccgtccccagaagcacggagttcgtatcttccttaaactcattcagcaccttgtcctgcgacgatcccggctgttgcatcaggattttgtacggaagatttttctcactgagaatggagtagacctcttccatgtcggtcttcgccgtaaacagcacgagtgccttcccgttggaaatgttcaggatctcaagcagccgctccacgcccttttcaatgaaggcttcgtgttccttggtcggatgcgggagatcgtcgcagtagtagatcatggcgtgttcatcgtatggatatggggaaggcttcggttcggataagcagccgcgttcaccaaccggaaagccggtattgctgataaagtaggaatactgttcttccagagacccgctcgtggcgttcgtcagcgtggcagaggtcaagatggttctttcatcaccattgaagtataggcggctaacaatttcccttgtgtttttagggcaatagacaagctccgtgttactaccgcgctgctcaatccagatcaacatatcatctatccggtcaagaagctccgaaagggactcgctgaccgcatccagatcgtcagaggcagcaaaggaacggttgtttctgaaatccatgctggaataaatctgaatgctggacgaaaggttatgtatggcggcgttcatctcggtaagcagctcaaccgcactgccgttttggtcgaagaaaaagcggtcagcatagcgcatatcctgttctgcctcgttgatctgcttttggacttgcgctttcaggcagttatagaaggcgatgatcgcgctctctgcctctcgcttttcaccggacacactgctctggtcagaggaccgcagctcatagaatgcactcttgatcatcccaaagagcataccctgtccgaaacgttccgttgtagcactacgcaccttatcatctaagttgtgcgcttcatccacgacaagcagatcagcggcggcgttaatcagcccgtcctgaccgcgccggagcttcatgagatgctgggtgagaaagtcctgattgcacagaacaacgccctccgtatactttaatgctgcgcggaccttgtaatacttgcacttcttttcacaggagccacaattcttcatgctgaaccgctgcacgtttaccttgtcccagacgccttgcggcaaaacctccgggaaatccttgcgttcctcatacttttgcttgattccttctttaagcgcgtccggtgggtctgctttcggatcacacatatattcatctgcgcgtttgttgcagagataatgggtctgtccttttgcgaggatgacatctctgttcagcccaagaaggggcattactgcgtggacatcacgccagagctgttcttgaagcgcgatggtcgaggttgcaatgataaccggcttgttcatgcgtttgctgtacagcagcaccggcacaagatagccaaaggacttgccaatgcccacgccagcttcaatcgcaaagtgctgatcgtttatgagggcgtccacaatctcaaaggacatatcctgctgcccttcacgcatttccaagccatgctgcggggcttcatcccaaaagaaggtgctgacttgctcactcatggagtacagctctgcttttctgcgctttttccgttcctccgatgtattgaatccaaaataaaatctattatccatccacattcctcccggaatagaaaccaaggctatctgcgtttcagctcaatgctgacgtttccgttctcgtcgatggtcagcgtcatgtgcctgatgtgcttctcatagaactgccgccgctctgcgggagacatttcgatcctcgtgtttcgcagagctgcatcaaacatatcgttgacattcaggtgaacggagttgtcaatccagcggtacatctccttgaacagtgcgtttttcttgatgtcctcgctgttgccggagtagaagtcatccagatagcagtagaatatcccagattctgcaagtgccgccttcatatccggtccgcatttttcccgctcaatcatgacaaggaatctggcgtccggtaaagaagagatcagcccccagtagtcggaatcgcttgagacgatgacgaaggaatccacttgcttctggtagtgttcctgacaggctcttgcggtgagcttgatgtctaccagtgatttgttctgcttgatccgctcaatcatgatatgttcaacggggatgcgggtgtagttttcaagaatccgccatgccgtagcggtatgtacgtcatcaaagagaatgatcgccgtaattttctgcatgacctcataatcaaggtttttgagcgtggcgcacagcttgtacgggtcagagttttcgcagtccactaccaatacggtcttctcactgtcatctatgaagtcgtagatattgttttttacaaaagcccctgcatcggagactttactgtattccgtgaaggcgtcgcaatgccattgataaagcagggtagcaaacttcttatcattatagaggacattgccctcgtccatcggtacccagttgatgtacatttgataggggtagtaggagagacttgcgtaatagatgtccgcagcatctttcgttccgtcctctgtcaaaccgtttggcataatgaacagctcttttatgtacgcccagttaatccagattggaaagaggcttttgcagttgttaatgcggtctgaaatcagccggttgatctcgataatgtggtggcagagctttgtactcgacttttttataaagctgattccatcattcgaaagctgctgcatactggaagccgggatgatctctggcattgaaagcagcccacggtattccatccgcatgatgtcatttattttccgataattgcgctcaatggcggtgcggatgatacagagattgcggataatgcgggcgttcttatcttgctcaagccggttgtatatctctatcttcggcggctcgtgttcattttggaaaatacgaagcgggacgccgatcaggtaggctacctttgacacaagctcataggtgctgtctttataagcaatctgctctccggcatattcgacgccattcaacatgactgaattgcccatgatctactcctttcgatggaacgtgggttattgagcgtactttttgaagttttcagcttgttccagaacctccttgtagacatcatcaatggttacgggggatagtcaaattcatccagtagcagtatgaggtcaacttgcagatttgccttaatgtcatcacgggtagaccagtcggtgtatttagctttgtcatcgacaataatcttaatccgctttgacaattcaatcatcttatcgtccgggtactcgaactcatacttcttggcaaccgccttgagaatgtcataaaaggctttttcctcgtagtcaattcccatgcccttgaaggagtctttttcctttttgagttcttcaaggagcttcgcaagctgctccgccacatcgtcaagaacttcattagcaaaagcctcatcacgacggcgattgttgtactcatcaacaacccgcttgaggcggtctgagaactccatgcccataatgcggttgacttttttatactcatcaatcgcttgagaaagaagcctctgcaacacctttatctttgtgtttggaagttggattgcattgatcttatccagatactcgtcactgaaaatatcaacagagatgtgcttccccgtctcaaacagttcctctataccatcagattgaattgcaccttcaagaagttcacggacacgggcattcatttgtgaaatgtcaggggcatcaccctttgtgagtttgaaaagaatagagcgcacagcacagtagaagtgcagatagtccttttctttatcagagatagcctcacttgaactgcataggttgaacgcttgtttcatgcgtttgactgccgccataaagcgagtttccaaatcttctgtgagctgtacatactcaacagcccgattgaggcaagcaagctgctctttcggtgagccgttgaagtaatccgtgctattgaagttgtggaacatctgagctaagacatcgagctggtctttaacaatcgtgatagactgctcgacgccttcaaactcatcgctctcaaagttggtgtatttcttgagggcgagattcatgtttttcttaatgccgatgtagtccacgatcaagcccttgtccttgccggtatagacgcggttgacgcgggaaatcgtctggataaggctgtgctgctggatgggcttgtcgatgtagattgtgtcgagtgccggtacgtcgaagccggtaagccacatatcaacaacgatggcaattttgaagtttgatttaacgttcttaaactgacggtcaaactccttgcgatcgtctttcgttcccagcatttcatatagttcaggctcatcatctttatttcgcgtcatgatgagcttgatcttctcgatgggtttgagttcctttttctctttttccgtcagttgaaccccgtcagggcaaacctttttctctgcccattccggtctcattccaactataatctgataaaaagcgtatgcaatcttgcgattagagcagacaaacattgcttttcctgcaacggtagctccttcggcaacgcgggtctcatagtggttaatgaagtcctccgcaactgcgtgaagtcggtcaggatcaccgatgatcgcatcaatatgagcaaccgccttctggctttcctcaatctgatgctcatttgcgccttcaacagcacagcggtcataataatcttcaatttcccgaacctttgcctgatcaagagtgacccgtgcagcgcgtccgtcgtagacaaggttgactgtgataccgtctttgaccgcctctgtcattgtgtaggcatcgacaaccggaccgaagacttcaatcgtgccatctacgggcgtgccggtgaaaccgacataggtagcattggggagagaatcgtgtaggtactttgcgaatccatagcttcgctctacaccttcggcagtgaccttgactttctgatcgaggtttatctgactacggtgtgcttcatcggatatgcagatcacattcgctctatccgtcagaagctccaagtcctcggtgaacttttggatggtggtcatgtacacccctccgcttgtcctgccttgaagttcctgacgcagcttttcgcgggaatcaatgctcacaacggtttcgtcaccaatgtacttcttggatgctacaaactgctttgagagctggtcatccaaatccgttcggtcggtaataatcaggattgtagggctatggaagaaggtactcttcataagcattcttgtgaggaagagcatagtatagctttttccgcagcctgtcgcgccgaagtatgtgccgcccttgccgtccccctccggtctgagatgtgccttgatattctcaaacagcttgaccgcagcaaaatactgaggatagcggcagacgattttgaggtctttgtccgagctatcagggaaatagacaaaatccttgatgactgccaaaagccgttctttgcggaacagtccgctcaccatagttacaagggaattgatgccgtccaattccttatcgtcagcttcaatctttctccacgcatagaagaagtcatacggggagaagaaggaaccgtatttattatttgcaccatcgcttatgacgatgaaggcgttatacttgaagagttcaggaatatcacggcgataacgcacggtaagctgagtataggcgtccatgatcgttgtgttttctttgactgcgctcttgaactcaagcacaacaacaggaatgccgttgatgaagacaatcccgtccggtatgcgtagctggttgttgatgccttcaatttcaaattgattgacgatcttgaacacgtttttctctggctcatcaaagtcaatcagctcaatgtaaatgtctttctttgtgtgatcctcacggttgaagatgaagccgtcacaaatcattttgcagactgctttgtttgcttcgtagatcgtaccggaaatagacctcaggcgaaggatgatgctatcaacttcgctgggggtaagtccatctgcggcgtatctgtccaggaggtacttccgcaaatcatcaataagcaggacctcagaacgttcacggtggatctgttctccattcagataaatataaccttcatcctgaaaaagctccatgatggacatttcaagagaatgctcattgaagttcgccattatcatttccccctaactgcctctgcatttctgcttcaaaggctttttcactttgctggaagtcgtactcctgatacttcaaacccagacgtgccagcatgagtgtaccttcccagtcatcaatgtttgagtattgcgttgcacggtttacgtctgtgagaacaccgaggatcagccctgtacaatcgagtgcaaagtctatcatttcctgtatgtccggatataaaacaggatgacgatccgttaggttctcgttgctcaatatacgctgtttatcgttgtgggcatagagcttattcctctgcattcggatgtcctctctttttttactcagcgcacagaaccgcttttggtacagggctaaaaactcaggaaaagtcaaatccacccgaaccggagcattctctgcatccggaatgttaaatatcgcaaagagtgtcctgtcagattcaacctgagccttgaaaaatcgctcttcttgtggcttgagctgatgctggtacgggatttgataggaaaacgctgttccatcatgctctacggtcattgtttctctgtattcaggaaataggtcttgattttccgcgcattttgcaaggagggttccaatggacacgacgccatttgagctatcatacagtttggcgatctccataaaacaggctttcatcaaagctccgtggatcgtttgatagaacgctggtgacatcttcatttcttccgcatattcgcgctggtttttgcgatactgctgcaatatgaggtaataggcatttgcgtcaaaagctccatgatgaagttcctcggcaattttgatcagcgtttccttgtccattttcattcctcccttcgtaggtaaatgataatttagaagcaactgcacaagcagtattccaagatcaattttcttcttactatgggtgtgacaagcttcccgaaggttatagcattgtcagtttggatagcctctgtacagtcaaaggtggcaaacgccttcctgccgactgtgaattacttgatgatccaacagaacacccttatattcgtgttcgtgatgttggcggaagtcgctatgtctgtctcacagaccaattccaatatattgatgaagaaacgcatcaagccatctcacgatatatagtaaacaccggagatattgtcatttcgattgttggtacaatcggattgctcggcaagattcattcctctcttgacaaagcaaaccttactgaaaactgcgttaaactcgcaggtattcatacggttacttccgactatctctattacacactttgctataaaaagcaaattaaggagattgaccttctgacagtcggtgcggttcaagcaaagttgcctatgtacaacatccaatctatgaaaatccttgtccctccgaccaaggtgatcagtgattttcagaagaaaatgaacgctttggacgagcaaattgaagcaaatacaatggaaatccagaaacttaatgagcttcgatccgttctccttgcaaaactgtccgattaagccgctaaattatcatttatccgccgctttagatcgatccgctccgtaatggtctggtacgccttcacaatgctgcgctgtttgtcaatagaggggacaggtagctctaccttgcacatttcatcccagtccattatttcccggacgctgccgtgagacttaaaacgtgcgtaacgatcaaactccggtctgctgaaccagagcattaggtattcgggtagtaactcgttttcatctttcacttcaaaaacggtatagatattgctgacaagcccctcatcataatccgtcagaagagcgataccaattttgtctccacgccgagaagtatctggaatgtaggtaaactgcccccgtttgactaccttgtatttcgtaaagtcggtaccaaccgtgtttgcaatggagggaatgaacatcttttggacggaaacacctaaaaggttttcctcttttccgtctgtgttcctgacatcgacttggcgaatgaaatttccaagcagcctatatctttctttcatcgtgacacctcaccctatgtattttctgtgtgccagcttgacattttgctgtttaaccatagcatagtgcatggtcgtgtcgatcttctgatgccctaagagctgctggacttgctctatgggcattcctttatctatggctgatgttgccaatgttcttcggaacttatgtgggtggacacgaggcagattcagcctttttcccaaatctcgaagccgtctttctacgccgccaatctgcaaacggtcatgcggtgcggtcagcgagacaaacaacgctgaacaggtgtctgtgcggctttccagatagttttggagatggatttttgtcctggcatcgaaataaacgatccgttccttacttccttttccgaaaacaacgcattcccgttcattgaagttgatgtcatcgcggttaagggcaaccatctcaccaacacgcattccagaggacgcaagaaggtctatcatcgcaagatcgcggacattgcagcagttgtcccgcatgatttccaatgcctcgtcggtataggtttccttgatcacctttgccgttttcaccttgtggatccggcgtaccgggctttttacgatgtaatcctcatcttcaagccacgaaaagtagctggataggatgcggcggatgttatctatcgtgaccttgcttgacttccggctcatctgatacactgttaggtacttccgcaagtcctcagttacaatctcttgaggctctttttcaatgccggacaacattgacacaattgtctgacggtaatagctcaaggttttttctgagcagccttcaatgcgttttgcgttgataaaacaggcaaccgtatcgacctttgcgctttcttccatgcccgcgctgtgacttagctctacgccactcagtaccccctcaaggacgccttgaagctgttttaactgtgcattgttcagatacggaagcatctgtcgctgcacttcttgaatcagttgttttttcattgtcgtgtctcctttgattattctcagagaacgacttttcagtggcagttcttagggtaaaactctcgccactggtgagagtaatggacggtaaatgataatttagcggcttaaccctgaaagcaaggtctgtgcgaaacctgtaagtttttctatctcaagattattgtcagcaacggcagcaagagttgcactcaccaacacagcccaattttgctgcaattcaatcggcggaatgggaatgtgtaatgctttgatataacttgtgggctttgcgattgatggaacgccggttgtgttatcatttgcgagtaattttctgcgcccggcatcagtgtgaaagtagaagagaacatactcaggtaatagcgcacgctggtcacaagtaagtaaaaactgactttgggaaatgacatacctgtcgaatttcgttttgtccggaacaagtgcaacttgccccagcgttccacgatgagtgatcacaatatcaccagagaaggctatcgaattttttagctggtttgctttttcttcctcgacatatcggaatgatcgttcagaaagcaagtagccagagatgttatctccgtttaacactggaacaccacgatcaacaaagcagtcagttttaatattagagccgaaaggtcccattgcaacgcgggacaatgattttcccaagggttgtgagaaccaatcactctgctcgtcacgatattcgggatgggtagcaaacgtccgcatgaactctgttttgcagagttccactaaattatcattttccgctctcttcaaagcaatgcggtcggtaattgcacggtaggacccaacgatctcacattgtctcgcataggaggaaacagggagctttatacggcaaagatcgtcccatgaaattccgcctcgaacactgccgtccgtcatgaaccagcattcacggtcaaactccggtctacgaagccacatcatcaaatactcttcatttaagacatcgcggtcaataatctcaaacatgaaatacgccggagaaactattgcggggctgtctttctcatagagtgcaatcggaagacgctcatcgcgcccaacgtgcattgggttacaggcaaacaatcccttgctgattagcttataccggctcaaatctgtgccaattacatttgcgacggaaggcataaactctttgtcgatgcttatgccaagaacagtgctggtgacttcctcggagttccgataatcaacaagctgaatatgtttaccaaggggttcataattcgatttcatagcccagctccttaaacacggtcaacaggtcagccttcgacttctcttctgcaacaagcagatcacgaagctcactttgcagcgtcttcattttcgtatcaaagtcgatgttctcatcacgatttacaaactcgatgtaacggctcggaacaagggtaaagcccttttctgcaacctcatcgaaggatgcgctgtaacaaaattcaggcacattctgataagtttcttcataaccttcctgctgccatgcgtggtagacgctcgtgaccttcgcacggtcttcttctgtcagttcaatgtacttcttttcataggggcttcccatttgccgcaagtccatgaaaaggatctcgcgctcacggttacggaagcgttttacctctccgttttcttcaaccacacgagcctttttattcttgtttagaatccaaagcgtaacgctgatgtcggtggtgtagaagaggttgcggggaaggatgatgattgcttcgacgagattgttctcgatgagctgacggcggattttcagctctgtgccatcgtcagacagtgcgccgtttgcaagcaggaaaccggcaacaccgttttgagagagctttgaaacaatattcagaatccagccatagtttgcattactcgtgggcggaacttcatagccgtcccagcgcggatcatcaatcagctcattatcaccacgccattctttctgattaaaaggcgggtttgccataatgtaatctgccttgaggtccttgtgctggtcattggtgaaagtgttcgctgccatttctccgaggtttgcagagatgccgcgaatagccagattcattttgcacagcttgtacgtcgtgtttgtatattcctgaccatagatagagaccttcttcttgttgccgtgatgtgcctccacgaacttcattgactgcacgaacataccgccagaaccgcagcaagggtcatagagaataccgtcatacggctcgatcatttccgcaatcaaattgacaatgcacttcggcgtatagaactcgcccttacctttgccttctgcaagtgcaaacttactcaggaagtattcgtagactcgtccgataatgtcattctctttatcgccggtgttgatcttatcaatctcgtccagcagtgatgccagctttgctgtgtcgatgtgaagacgtgagtagtagttgtccggcagtgcgcctttcagtgcgggattcgctttctcaatcgtatagagggcggtgtcgattttcagcgcaatgtcatcctgtttcgcattctccataatgaaagaccaacggctgatctcaggcaggaagaacacgttgtccttcgtgtagaaggcaacattgtcaacaaacttctcaccgtatttttcagaaatagctttcctttgtgcctcaaacttatcgctggcaaacttcaaaaagaagagactgagaacgacgtgtttgtattccgctggctcaacagaaccacggagtttatctgcggacttccacagagcttcctccatagaaatctccttcttcggtgccgatgcggctcgtgccatatcaaaatcctccctgtgtatttatctaacctattttacaaaaagagctgtacgaaaaaccggactcagttcttgtccgttcgcacagcctcacatatatctccgatgtcacagttcaagtaatcacaaatgcgcagcaaaatagagagggacacttcttcccccttattcagttttgtccatgttccggcagacagccctacttcatgtcgtagagaagccttctttatgtcgcgttccagaagaagcatccatagtttcttatagcttatgcgcacggcaaccatcctttcgcttgcttgcattcaacatcgcttataatattatactggatttcattctcaaaagcaattcgttgatgcagaaattaaagaaaaagtttcaatttctcgaaccttctctcaaggatgcagggcatctccggtcaacaggagatgccctgcttttgaaaggactattcgcgctgtgtgctgcgcagatgatcacggtcatggtcaacagaaggagcgagaaacgcatcaacattagacctgatcgtctctatttgctttacttcttttttgagcttcgcgcgttcatcatagagccgttgctgctcttcaagaagtcgctgctgttccgcttgcagtgtcttcaagctcggcagtttttcatcgccctgcatggcaagaagcgtactccgcgccgcctcaaagatcacaagctctgcctcatgctttgccttgaaccccggcttgtcttttgccttctggaaggcatcatatacaggcttgagccgctggtagttggagatatttttgatgagcggctggacttcccgcagacgtgcttcaacgcctttcagttccttgccggtacggtcataggaaccgtgaacatcctcaaccttcttctcaagatcggcgtattgaagcagattgttttccgtgagatagttgagtgtccgtgccgcttccttgaggatagtgagctttgctttatgctcgtaacccttgctgtcgataagcctgatccgctcctgaatatcttcgatgagagagatgcccttcggcgtggtctgtctttggcttcttcggggcgtccgtccggcaatccgctccttgatgcgttcctcggtgtagttctctccgatagttttagaccgggtaaaccgctcctgaccttcagcacggaaggagatgtatttgccagtcttgatttcatatccggcttcctgcatgagccgcagaaaatcatcgtagtccttcgccgtgatgacgagccggtcgatggtctgcttgagtttctgcttccagctcgtgccgcgtttggcttcggtgtactccttgtagcccatgcctttgttctgagagggaggaataacagagagaccgttttccttacagagccggtcgctgacctcgcgcatatcatagtaaatccgcttatagctcttatatgcgtggtagtccacgaagtcaaccgcattgaaaatcaggtggttatgaacatggtctttgtcaatgtgagtggtcagcacatactcatattttcctccgaggatttcatctgcaaactgcttgccgatctcgtgggcaagctccggtgtgacctctccgatttcaaaggactggatcacatgacgggctatgatcctgaccggattcatccctttttgctcggctatcttccgcgtccattcaaattcccgcgctgcggtctcgctggcacagccgtaggacgagaccagcagcttctcgtctgtcttttcgggattcagaatgtacgcgattgccttgctcaaagttcctcggattgctttgattttagtaactgccataccgcgtccatcttttctttcagctcgtcaatatcgtcctgatagaatcgtcccgtcgagttgatcctgcggcagacggtattgatgttcacaccgatcttgttgatttcggcggcgagctttttctgctccgtgtagtccacaacgatgatgtagccgtcgatcagcatcttccttgcatacgcaccgaagttctccgtgccgatcatttccatcttctttgcaatcgtccgttcttcctgtggtgtcagccaaatcttcttctgaatgtctcgtgttcttcgtaccatgctgcgccctccgtcgtaaagattagaagggtttgggactatcccaacaagcaaaaatctgatgttaagggcagggtctccttaactgatttttctccggtgggtactcaccggatttgcttgctaatctcccaaaatcgtattccccgaagattcctccgtgaaatgtcccttcactttacaacggacacaaaaagggcgtttgttgagtaccggatttcaaaaaagttaaaaaatcattggatttcccatgtgaaagccaatgtgtctgtcacatcaatatcaaccggctcaatctcaggtgcggcgcacttgctcatcgccatgagaggctgaatgcagtcttcaacatcgtagcttgttctggaaaaaacattgagttcgccccagttgtagtcgatgttgagcaactgcccaagcgtactgcctgatgctttgcaaagaatctccgcctttgccctggcgttctccgtcgcattgatcagcagctcttcgcagactcttgccgggtttttcacggtgaacgcaatgctgagttctggttgcgccccacaatccgcaatcgcagaaatgacctttgcaagctgcttgctgtcaaagtcaaaggcaagtttcaagcgatagctgcaagcatatccggcaaactctcgcttgtaatttccttgccgatccttgacattctcgtaccttgtctggacatcaaagctcgtggttttcaggtcttccttgcgatacccaacgcggactgcggcaccttgcagtctttcgattctctcggcagcttccgacattgcgcggtcataggtttcagataagacttcaatgttcagggataggatgatgtaatccggtcttgtggagacattgcctgtcccttttacggtgattgttctcattactttctcccgtcctttctggaattgaagtcctcatcaatacgttttttccaattcgtacccagcggtacgctgcatcggacagcggaaaccgctttgctcagaacttcatagttgagttgcgttccctcgcggtcagagtggtaattgaccgctcgatctgctccaattccaaaatgctttgccgtctcaactgcatcaatgtttgcaccgaggaaaagaaactcccagccgtacttttccttctgtcgctcaatcatcttcttgaccttctcgctgtcataacggcggcttgcattctccatgccatccgttgtgatgacgaacagtgtgtgttcagggacatcctcttttcttgcgtacttatggacattcccaatgtgatgaatcgctccgccgatagcatccagaagcgcggtgcagccgcgaacggaatagtccctgtcggtcatcggctccaccttctgaaccggcacacggtcatggataacctcgctcacgttgtcaaagagaacggtagagatcaatgcctcgccattctcttttttctgcttttcaatcatggagttgaatcctccgatggtgtctatttccagtccgctcatagagccgctgcgatcaaggatgaatacgatctccgtcaagttctttctcatgttttgtacctccgtatataaaaatatgactgcttggtgtctcaccttacagtcatattgtacttcggtattcacttcatttggtcgcatggcaagcgacattattctaaggacaagaacagctctccgtcaatgcttaggatgtcatccatcggaatcttcgtgccgtcctgcatggtaatcaggcgctcaaagtcatcaacctttatgactgcgccggttgcagttacatacgcaccgccagctttgcgctcatcaggtttgaagtaggttatttcaacctccggctcttcatcaagggcatccatgagaagctgatacctcatgttcaaagcggtcaaggctccctcatcaagctcaatcctttcgtcggtcagacgtccggtttccttgattgcagaatcatagccggtgagggcggcaaagggcgcaaactgcgctgcacgatctgacatcggcatttgtggtcgcgttttggaaacgtggtgaggaagtcccatgatctcgtcgtattttccgttcacgccttatgccctccaatctgcgcattgcggtctttcgcggttgcaccttcttcaagattcattgccttgaggatggcgttctttccatacttcttcttgatggcaagcgtggcggcttgtatcttccgctcacgctccaaagcggcatcttcggctttctgtttttcctcttcggcggcatagtcggtaaagaggtcgagctggactgcaccgtcgtttttcttcggtacatcagcttccggcaggacatgatttgcaacaacatacatacggcggacaagcagattcttatccacgatccggtcgaagagttctgacacagcacacattattttgcgagtagatgatgtgtgaccgtcgagattgatagagccgtgcgcctgtttcggaatctgcctcccataatgatctgtctcaaccgcgccgtgatactttgcccgtcgtgccggatcggtcaggttctcaatgtcgtagccgactgtgagaaccatttggtcggtgacaagccccttgtccaccaagtccagcacaagcaaatccgtcatctctcggacaaccagctttgctttatccgtctcgtatgggcagtgcaatacctgaccggagctgatgctgttggagctgggacggtacgccttgatcgcttcaatggtcgtaggttcccaaccccacgcatggtcgatgagcaattctgcattcttgccgaacagcttgtaaagcaagtcctcgtttcgctctgaacaaagtgcaacatcgcccatcgtaaacatcccgttttgctcaagtttcttggcaatgcctcgacctacgcgccagaagtccgtgaggggctgatgcgtccaaagctcacgccggaacttcatctcatccagctctgcaatgcggacgccgttcttgtcggcggggatgtgcttcgccacaatgtccattgccactttgcagaggaaaagattcgtgccgattcctgcggttgctgtgatgccggttgtttcaagcacatcgaggatgatcttcatggcgagatcatgtgctgagagcttgtaggtgttcaggtagtccgtcacgtccatgaacacctcgtcgatggagtagactacgatgtcctccggcgcaatgtacttgagataaacctgatagatgcgggtgctgtactccatgtagtacgccatccggggcggcgcgatgatgaagtcaatcgccagagacgggtttgcttgcagctctgagaagaagtgcgatgtgccgtccagcctgtgtcccggcgcgtcgtgctgccgtccgacattcgattccttcacgcgctgcttgacttcaaacagccgtccgcgtccggagataccgtagcttttgagggagggtgtaacggcaagacagatggtcttgtccgtccgactttcgtctgcgacaacaaggtttgtgtccagaggatctaagccgcgctcccggcactccacggaggcgtagaaggatttcaggtcgattgcgatgtaagtgagttgtttcaccttctttgcctccgctttcttcttagatcatccctaatgacatttcattggagcttttaatgttgaatacgatacgccattcaatatcaccctccaccggctcaaagtgtagagaggaacaaactgcatgaagtttttcttttgagctgcctccacacacgattgcgattggaccgtccgctccgccgataatgccaatacaagcaatatcgtttcgtgcctctggtgcatagcggtcagagcatggcgcaattttcaaaggtttgtccccctcagcgcaatcacagattgaaatatcatcgtctggttcaggagaaaacgtatagctcatggcggtaaaatgcgtcggataaagccagcggtcagaaccgaaacgcttttcggaaattgtctgccgctccaattcctgtacggtcaatgtgtatttttttccactgaccggatggaggaaagaaaacgaatcaccgggagcgtgtgccttgaaatgtggtcccgggacacgacacgactgctgctccattgtaagggagagggcttttatttcaggacggcgtttgcttgtccacggaaaagctgcccgaaaaatcatccatccataggatgtatccaaatcatagtgttccaatgcccactttgcttccgcttcattgatcaccccgtctggcaaacatggattaaagaccacggaacagccgtgggaggtcagcattgttttcccgttcaattccaaacgaggaataaagtcaaggcaaagtggattgtctaaatctatctgcatttgctgctcctgcgtgaagtattcgcaggagtcgttttcggggtgtaaatcccatttagttatgaacttgcgaatgtcttcttccggggtgcgcatacaaaagtccatgacgagtcccttgctgcaagaatacgccgcaggaataacccaatgatgcctcgcccagtcaaattgcttattcaaccggatttccgttccggcatggtcttttcccgaatgtccccagaagtttccctcaaagtagaccttccactcaggcatggtcggttctgcttctgggttcatatcaacatcataatagtcctcggtgtacttgatcttgctataatcaaaagatgcttgcagctttttgatgtatacccacggctgttccataggcgtcaatttcattttctcagcaagctctgatagcgttctttgctgatcctgtgttggagggttgtcctgcaaaaaggcttcaaactgggctttatcccacatccacgcctgttccagcgctgccgaatcactgcaagcaaggagcaacctcagaaagtcttcaaaatcgtttgccagcggatgaacaaaatccggagccgagttcatgggactgacggaaaataccataccgccaaagcctcgaacaaagcagaagtggatgccgtccacacccgcccagccaaaaatagatgcaccttttggcgtgcaaaagtatgggttgttatcttcacgacgcttcactcctacggaagagaggtcaataccacttcgcaaaaatttctgaaacactttatccatagaccttatgctcctattaaactttggtcaaaggcaaacagagcctcgttgatctcaaagacgttatagttcccatgctccacgaaatactccacaatgatgtcaaacttgttggagtgggagagtgcaaagcccgccttcatgagcatatccttcatttcggaaagtggcagctcaagagcgatggcaaaagcaatcgctgtgggcttgctcggcttgtagagcttgtcgctgcggatcttcgagaagagcttccggtcaatattcgccttcttatagcactgcgcgtccgtcatgccgcgttcgtcaatcttccgcagcagcatctcggaaaagctctcgtcgatctgttccagtgcatcgtcgagtgttgctgcctttttgggggcagccgccgcaaagacgggaggcatgagctgttcgattgcctcttcacaaacggatgcctcgcaaggcatgggttcttccatccggaaggcgttcatcctgcgcagccgctcagaacgaggatcggtatgctcatccacatagcggtcgtctatgtacgctgcaatgtcggcaaacagcttgccgctgatctgataggctttgcggtcgaaaataacgatgtacaccgtcatttcgttttcaagaaggaaactgctgatggtgtcaatcgcaaccttgagggcttgatcctttggatagccgaaaatgccggaggaaatcagcgggaacgcaatcgattcacatccgtattccttcgccagcatgagcgatgtccgatagcaggagatcagcagttcgcgctcaccatgccgcccgtcataccagcgcggaccgactgcgtgaatgacatatttgcagggcagacgatagcccttcgtgatttttgcgctcccggtttcgcagccgtggagcgtttcacattctgccagcagctccggtcctgcggcacgatgaatgcagccgtccacaccgccgccacccagcagcgactcgttggcagcgttgacgatggcgtccaccttcatttttgtgatgtcatttctgacgatttgaagcggcatgatcaagccctcccattcggttacttcgcgccggtcagcagtttgtccagcgggattctttccgggtattttccttcggtcagaatgtcatataaatacctgttatccagaatcatatcatcccggataagctgccagtttgcctttttcctgaaaaacaccttgaagatcaggaagttcataatcgccccaattaccggcgtggtcatgccgaaagcctcggtgtgagagaaatggcatcctgttttggttcttttcccttcaaaggtgatgaacgccgttttcttgtcgctccggaatacaatgcggaagtggttctcatcctgttcgcattccgtaattgtgccggtcacatcgtagtccagccccatgacgatctcgcggaagcggatcttgcttcctgcgttatagtttccgttatagagattgcattcgatgtggtagggactccatttcacaaactcttcctcaaagttagcagtccatgcctttaatttttcataggaagccggaatctctatctgctctgtaagaacaatcattgtcagtttctcctattctgtcaaagcggcatcggtgtccgggcgatcagaatgaccgccagaatcgcacccacaaatgccgcagcccctatgaccgccaacaactttttgctgagtttcttctttgctgccttgccaatcagcgcagcgcaagccacgcagacagccgcagccacaagtgcaatgcccagcgtttcccatagccacgaaagttcatgtagtattttcatgcgatcatcatctcctgttcgttaaactggaatttatagtcctctcaaaaccaatttgctttttcttctcgaaatacgggaatatcactatctcgatatggattgtaattatgaagattgcaaccaaactcttttaatgattttattttgttatcctgtgtccatacaattaaagatattccgtcaaattcttcaacatttccattattcattttgtttttaaaataccactccacgattgtttgattgccttgatgaaaaaattgcttaatctcccagacaagaacacttccgcgtgtattccattcgtcaaaccagtgctttaccgttttgcggttttcatatttaggactccaactctcagtatatacaacatcatctgtaaaaatattgtcaattcctaaatctgctttcttaatccacatatcaaaccataatcggataattttttctctctcgttcataaagcacctccacaacttccgatttgtctgccccttaaagtccaagtccttcaacccacgccgcaagctcctgatgcccgacgcagcccttgaaaaccttgccgtccatcagctttgcgcctttgcagctcggcgcaaggcgttcgttcgtcttgccaatgtcgcttcctccggaggttgcaaacgggatgatcgtcttgccggtcatatcatagctctcaaggaacgtattgataatcgtcggcgcaacgtaccaccagatcgggaagcccacaaaaattgtgtcgtagtccttcatgttgtcccgctttatggcaatctctggacgggaaacaggatcgttcatctcaatcgtgctgcgggctttcttgtccatccagttcagatcggcttccgtataaggcactttcggctcaatctcaaagatgtccgcgccgattgcctctgccagcgtctcggcaacctttgcggtcacgccggacgcagaaaaatacgctacaagtttcttactcattgtgttcttcctcatcaatcttttcatttccttcattcagcatgaagtatagcagagcttccagcaatgttgccatataatgaagcgaccagttttcttccggctcttttgtcatcttatcaagcacggctcgaaaagccgtggtacggtcaatccttgtttcatcatcaatgcggtcaagtatgcccttcattttcagggcgagttctttttcctcgtcagaaagctccggtatgccaagtaactcagatagtttcttgtcctgcataatagcatcgtattcgatgtatgacttgtgttcggctgacatcaattcttcaaagtagttgataaaaatatgaacgcgaatgccaccttcttcgtccggggagaagcagacggtttgcgatttttctgcaatttctttcaaaaatgcaaggtcttctgagtcatcgaactccgcaaacggaagaaacatattgatttccgcgtgccaacgatgatagtccacgattcccttgatatacccgcggtgttgcttgacaaacgcatcacagcgttccagaagatactcgtagttcttcttgtcctccggtacaatgatctttggtatcttgtccattgcttcggagtacgctttcagcataccacaattaactgcgcggtcaaacacctcatcgcaccatttatcgtattcggcagactcggtttcccggtaatccttctcaaagataatatcgtccattgcgttacccctttatgattttctcaagctgcatttcggtcgcgttaggcagacgtgattgcagatgttttagaatgcgttctttggattcctgcgggtctcgctgataggcagatgtgataaggtcgtacccgaaaagttcttccggcgtcgcatactctgcgacaccccagccataaggtcttccgtatctgtcctgcatatagacgaaatccgcgatgcagacatagctctgcatttgcagccgcgtgatgcacgtctcaaaaccggtgttgccgcccttgcggtagttcagagcctctttcagccgtttggaaagcattctgccttcaccggctatggcttcataaagctccttgtccttgtaggacgccaagccgtcatcccaacgggcgtcaaagtcatagccgtcacgccggaagttcgcaaagtccggaatccactcccgactcacaaatccagccttcttgttgaaaagtttgccgtaaagacatttgccgctccgcgcagccggtcctttccattcccacggaccatctacatcatccgcaaaccataactcaggtgggcaaagttcctcgatggagaagccgtgaatctcgttccgaaagaagggcagaaagccgtattgttcgacggcggcaatcaaaccatctgcactatgtagttgtctggcatatctctttgacattactccgcctcttcaatcacgccataatcaatcaggatgttcttctccgcatactgcgggtaaacaacacccatcatctcatactgataacgtcttacgcggcgatgctcctgaattggttccggtgcatacgcagcggtttcacagtgcgcatactccggcatttccgcaagatcatcccgaacatcacggataagcgcttctgccacatcatcaatgttcttgccggtctccacggcaaccagttcgtgcttccggactgccttgtccagattaccgggggagcgaaacagcttatatttcatatcgttgcccgtcctttctctctttcggtctgcctattcttcctgaaatctgttctttagggacgcaatcatcgcttgtgcggcaatgctcagatacaaaactccaatttcatagataaagtcgcggtcgatcacgataaagtattctctaacgtgtgtaaaaaccagttccagcaagtccctgtacagcggatcatcaaagggcttgaaccgcgtaaacttgcttttggcagcgtcccatgtcatagacgcttcgccctcagcactggtcattgcctcacagagaatcatgctgacgcccatttttccgttgccggtcaggagttctccttcgtaatagctgagtaggtctttcttgcgtcgaagcggaactacatcgcagttgtcatccagctcaaatgcaatcagctccgcaatcagttcccgccagaccgcataaccggcgttaatggttccgtcctcttcgcggctgatggtatcgtccatgcagtatcgctcaaagaaattatctccgtcaatctcgttgcgggtgcagaagatatgcgccagctcatgcagaagaatgtgtttcaactctgccggatgacgcgctatgtctgtgcgcagaaggattccgtccgcgccgtctcctgtgccgacgaatgcagaggcgtgaaagtcaaaatagccgtcctctgtatatcggtcttccagccggtcagggaaatactgcttgcagaactgctcaaagacttcctgctggttttccgcctgaaagcagcacagcacaaggttgtcctcgctgaactctgccccaagcgttcgttaaagatggaagcggcatagaaaagggcttctttatagtcgttatcgttcatctaattactatccttcatcctcattcaaccctccggtctgacatttttcaggaagtcagagtgcggtacataaggcaagttgagctgccagcccatgcggttcagctcgttgagcttgatcagcatcaggttgatgtttgttcccattgcagccgagagctgcaccacatcgtagtcctgcttcatcaggtcaatcagctcatcatcgtcaatgatcaggtgtgaggcaaacgcattcgcctcatattcgtgttttgtgcgcatatcgaacagcacgaactccgggagcggttcgtttcctttggcaagatcacggtgaaaggtatcatgcccgatctcgtgaccgcaaaccatttgcatgatcagatactccatgttggagttcagaagaatatgccgctctttatggcggtaggtgtacattccgagcagatcgttcagattgtcaagaaaatggagatgaatgcccagctcacgggcaatcttcaaggtatctcttgttccacagcttttgacaatgctgttcgcctttttgtatatttcctcggagcgaattatcacgggaccttcacccctttcatgttgaaaacagtcaaagtaaatccgtcaagaaaccgagacgcagacagttattcctctgcgtccgtaccggtcttcttgtatttcttcggcgtgtatttctcaacattccgggctttggattcccaatatatatcctgcaacgccttcatcaccgcatccttgtcctgctcagacagcgtaccgcccgcaaacaagccggacatcccttcaatcaggtcctttgcctgtttcatgccacgggagccgtactgctcggatgcctgaaccacaaactcttcgtcctcggtcagcagatagttcacatccaccttgaagtattccgcgatttttctgtaagcgtccttggtacggggaaaggaaatgccgttctcgtaccgggtaatcatacgtctgttgattcccagtgcatcggctacttcctgctgggtcagcttccgcttctcccgttcagccttgaatttctctccaaacgtcattttggtaatcactcctgttcacaaaaagtttgcgacatcaaattgcgcaagtctattgacaaaggcacttgaagtgcgtataataatgactgagcaatctaactactcatagtatatcttgaattgctcatcctgtcaaggggcatgagtagttgtacacgaaaaagttacatcttttgagcagttcaaatggacaggcatttatgctgccgaagattatccgtaccggcatacaccggtatgagggaacaggagtgagaaaaacagaaatggctacacagtacagaaaagcatacgtcccggttacgctggatgtggacaaggagggggcaatcctccctcgccttatctggtgggacaacggtgtaatctttcaaatcgaccagattctatacaaatgccgcgccacatccaaaaaggttgggggcggaggcatccgttacacagttcagattcgcggaaaggagtcatttcttttccacgaaggagacaagtggttcgtcgaagcaaaggaggacaactgctcatgattttatcccagcgccaacttgaagaaattgcagcctcaacaacgaaggacttcaaccggttctttttcggggatgaggcggacaagcccgaccgatcagctttgccaacacccattgatcagtttgcaaagaactatctcggtcttcgcgtatcattcgcccgtctctcgccggacggaagcatctgcggtgtcactgcctatgccgacactgagtacaagatcacggaacttggtattacgcgcacactggctttgaagcgtaatcaaattatcttggacgagagcttcattcgatccggcaacgtgcagcggctctgcgccaagcgcagatttacccttgcccacgagtgcgcccatcagattctcttccaactggaatcggaagaggtaaaggcgtcctgcgaaatgaaatattccgcacggacagcctatacgccgcgagagctgaaaacccgcgaggactggaacgagtggcaagcaaatgtcttgggcgcggcgatcctgcttcctcaaaaagaggttgacctggcaatgcgtcggtttgcagaaacgccgctgatcaattacgaggggaggtattcgtatggtgatcacttaacgctgcgccttttctgccgtttgttcggtgtctccaagacaacggcgtctatccgccttcgtcagctcggctacatggtagatcgtccattcagtgagtatgttgacccattggaggtgtggtaatgaagagagcatccattcgggttcaggaaccgacgccggagctgatcgaaaaaatccgcagggcaagagttgccatttcccagcagaagccccgatacctgaaatgtccctattgtcagcataatgccattgctgtctacgaggacacgaggggtcatgtagaatccaagtgcaagaaatgcgggcggatcacagtctttgatgtgctgaatatgagaagactgcgaccgcgtaccaagtaagaaccggaggacaagcctctgttctaaaataaaatatatgtcatagctgagctgtggagccgcctgataggtgaagtcatcctaatgccgcatgagacagagtttaattgctctgttttatcggcatgggattcaaacctcaccgtcatgcggctctttttctgtcttcacccttcccgctgctcccgcgcagcggaaaggatgaacaatgaaaatccctaagacccctatcgcgttcgattacgacctctggactacggaggacggcaagtgcatggtgcgcgtgaaacgaaccggcgaagtttccgaggttgaccgcaaggttatgagaatccttcgcgcagaggaaaagcggatcagacgctcgtatggctctgacaacacctctgaggatgaggacggcgcagagaaaatttctgacaccgtgctgtcccttgacgctatgccggaggacgatgtgaagtccgctgcatggctggcagactcccgcgactgcatggaggaactgatcaccgccctcaaagagaaggagcttctttccattctgaccgagaagcagcgcgaattgtatcttgcgatgacccgtgaaggactgactcttcgagagtttgcccgaaggaaaggcatcggcatcagagctgcatttgacctcaaagcagcggtgcagaaaaaatttcaaagaattttttgagcggtactcaacaaacggcaaaaagatgtccgttgtaaagtgaaagggtcaatcagaccacttcactgctccttgaaaactgaatagttcagtgctgcggatctttccgcttctgcgaagcaacacagcttccgacgccaagacctcccgaaagggagtgagcgacctccggagagctataacagtcgtgtggtgcggctgcttgcgacgatgcagatgccgggtataatgatacttccgtcttttctttgaatgggcggctcggagcgatcctcggaggggtgagagtcccatgataccgattgaccattggtagtccgcagcattcccggaactgcaaagttcttctggcaggggcgcgagctgcaaatatgccggacaatgaaacaaacccaaaagaaacttactatatagtttcaggatgaaaactatgtggcagggtatcttcacaagatgctctgccatatccttttgtcctgaatatttcacgaaacaggaggtgcttagaatatgatgggcattgaaacaatgaaaagcgtcagtccgaaaacggttgaccgaagcacactcgttcagagaagcagcatccggcttgatcctgcggcaccgcgagaggacaggctgagggagttcatcaagcagatcagaaatccctattgttatctggacgggaaaactgtggtgaagatcagcttcgccgcgacggacacgacaatggaagattgtctggaacactatctgagaggtctctgatttatgaacagtctgaatcttttcacccggttctatggacaagcgattgagcctgtggtataatgaaatcggtcaaaaaagaagaatacggattaagccgcttgccctgatggtcatgtggcgttttcgtgtttctcttcataagagttgaagcaagccttcgtctttctgatttgatgtaccacaccaaacagaaaaacggaggttatttttatgccagacaaggtttaccgcacggcgatctactgccgtctgtcccgtgaagatggagacaaagtagaaagcaactccatcgccagccagagagccatctgcgaggactatatcgcaaggcatgaggatttggagcttgtctgtgagccgtttgtggatgacggttacagcggcgtttccttcaatcgtcctcagttcaaaaagctggaagaggcaatccgcaagggtgcgcttgactgcatcgtggtcaaggatctcagccgcttctcaagaaactacatcgacggcgggcgctacattgaaaagattttcccgcagcttggcattcgcttcatcgcaatcaatgatgcgtatgacagtctgaccggtgatccgcagtccgactcctttgttatcccgttcaaaaacctgattaacgattcttactgcaaggacatctccatgaaaatccgaagcagtttggaagtcaaacagaaaagtggtgagttcgtcggctcgttcgcgccttacggctacatgaaatcgccggagaacaaaaaccagctcatcgtggatgaagcggtcagcgaatatgtgcagatgatcttctccatgtacaaggacgggttctccattgggcgcattgcaaagcgtctgaaccagatgggcgtcctgtccccgatggaatacaagcattccgccggtgtgaagttcgataccgtcttcaaaaccggcgataccgcaaaatggacgtacaaagccgtccagcgtattctcaccaacgaggtttatatcggcgttctggctcaaggcaagcgcggcactcccaactacaaagtccgcgtcgtgaagagcaaggacgaatccgagtgggtcaaggttgagaacgcgcatgaagctcttgtgtcctacgaggacttcatggcagtcaaggtcatgatgcagcgggatatgcgctgctcacccgatcaaaacgaagcacacctgttttccggcttcttgttctgcggagactgtcagcagccaatgatccgcaagaccgtcccgtcgaagacgaaaaagtatatctactacgtctgctccaccaataagcacagccggacgtgcagcccgcatagcatcgccgcaaaagaggttgaagagaaggtcttccgtgccattcatgaccagattgagcttgtcatcaatctggaacacgcgcttgcgatgatagaacggcttccgtctcagagccgtaaggctttcaattacgaagctcagatcgccaaaatcgaggaagagattgaacggtaccaaaagctcaagctggggctttacgagaacttcatcggcggcgtcattgataaaacggaatacttcgagttccgcaacagctacaccaaaaccattgagggcaagcaggacgcgcttctgcgggttaaaaaagaaatgaagcagacggtgacaaccggcacgactgaacggaactgggtaacgctttttaagcagtatgaaaacgtcgaagagctgaaccgccgtgtgctgatgtcccttgttgaccgcattctgattcacgaaaaccatgcaatcgaaatcgtcttcaaatacaaggacgaataccagcagacacttgaatacgttctcggttatgccgacgaactggatattgccgtataaaggaggaatgagcaaatggcaagaaaaagcagaaagcaaattgcagttgaagagccggttatcgaatctggctcttccgaggtcttctcaacagccatctatgcccgtctttccgttgaaaacagcggcaagtccgaaaaggtggatgtcatcgcaaatcaggttgagatttgcaagtcctacattgcagagcgtccctacctgaatctgatagatacctatgtggacaacggacgaacaggaacggtttttgatagaccggagttcaaccggctgatgaacgacatccgcaccggcaggatcaagtgccttgtagttcgtgatctcagccggttcgggcgtgactacatcgaggctggaacctatctggaacgggtctttccgcagatcgggcttcggtttatcgccatcaaagagaactacgacaactttgatacggacggctccggcgaaagcctcatcatccctctgcaaaacatgatcaacaccctttactcgaaggacatctcccgcaaggtttctaccgcgctcaaggcacagatggaaagcggagagttcaagaagcgcaatctcccgtatggttatcgctgggatgaagaacacagcaatatggtcttcgatgaggaaaccgcaccgattgtccggaagattttccaatggaagattgaagggctgtcccttcctgcgattgcagaccggcttgatgcaatgaacgcgcccaatccggagtttcagaagtatcaggtcggcgtccgcacaggcaatgctacggcaaagaagatttggaacaagtcttcactgactaccattctggataatccccattacgtcggagataccgttctcggacggacgctgaacgccatctataagggcgtcaagaatcagcatatcgaccgcgaggaatggattgtttttcccaatactcacgaggcgattatttcccgcgaggacttccaaaaggtacaagagctgcgcgacgctgctgcaaggacaaggattgagaagatggagcgcacggagaaaatccgtgctacactgatcaatctctttgaagacaaaatcatctgtgcagattgcggcaggaaactctatttccatcgaaagcgcgttgacaagcgtaaggacggcgcatggtacgccttctatgagtgcagctcatccgtcaagcgcggcaatctctgtacgccacactatacgcggcaggacaaactcgaagccgatgtgcttgcggcgatccagcttcaagtcaaggcggctctcaattacgacaagctgcttgccaaactgagaaacagcgaaggtgaacgcagcatccgaaatcagcagaatgcgctcattacaagcctgaatctgaaactcagcggtatttccaagaagcgtacccgtctctatgaggacttcacggaaggcgttctcgatgaagaggaatacgcctttgccaagaaagcctacgatgagcagtatgccgatctttcccggcggttggatgaagcggttcagcggaaggtgaagtttgccgaggcaatgtccgaggacaacaagtggctcacgctgatgaaatccgtcagcggtgcagaaaagctctctcaggagttggttgacgagtccgtagagcttgtgaaagtccatgaggacggctcaatcgagctggtcatgaaatacggcgatatttacgctctgaccattcagagtatcaaggaagtgcaggaggcgatgtaaatgagcaaggaatacaacatcggcatctacatccgcctctcaatggctgatgaagataccggttatggcagcaaggcggaaagtgacagcatcggcaaccagcgtatgctcatcaatcgctttctcgacaatcatccggagttgtctcactgtcagcggtctgagtttgcggatgacggttataccggcacgaactttcaccgtcctcagttcacgcagatgatggagaaggtcaagcgcggcgaaatcaatctgatctgcgtcaaagacttttcccgcttttctcgtgactacattgaaacgggaaactatctggaatgcacttttccattcatgggcgtccgctttatttccatcaacgacggctatgacagtgacgattacaaaggcacaacgggcggcctggaagtggttatgcgcagcatcatctacgccgcatacagcaaagacctttccgtaaagaccacatcggcaaaaatccagatgatgaagcagggcaagtatgtcggtggctacgccccatacggctacgtcctgcatcccaccattcggaacaaacttgccgtagacccggaggcggctgatgtgatccgtcgtattttccgcgaggcgctggaaggcagcaacacctctcagatcgcccgcagcctgaatgatgacggcatcccgacgccggggcaatacttcaagagcaagcatcccgacaagaagaagttcagtaacatgagcgagaaaatcagttgggaaaccgtgatggtctataacatcctcaaaaaccttgtttacaccggaacactggtcagccgcaaaatgaagtcctgcggtgtcggctcaaaaaagcgtgttgtcaatgagccgattatcgtagaaggaacgcatgaagctattatcagcaaggaagactttgagcttgctcagaaggtcattcgaggcggaggacggaatcccacgcgcaagcagcatgactatccgctcaagggactcgtccgctgcggtaactgtaaacgtgctatgacacgccgaaagaacaaggctggcattcggtacttccagtgcattcactcggtcaacaacggaaacacagactgtccggttggcaggagctttccggaaatggatattgagaaggttgtcttccatgcccttactcagtttcttgctttggcacagaaggaagcaatacagaaccgcgaagtcggtgatctgcggaaatctgccatcaaggaatgtgctgataaaatccgcactctgcaaaagcagaacgagcagaacaaggcgtccaagctgaggctctacgagaagtatgcagccggaagcatcacgaaggaggcgtacattcagcagaaggcggcagcggatgtgaagattgctgaaaacgatggagcaatccagcgcggtcacgagcggatgaaggagcttgactccgagaccgcctgttcagatgaaaagctggatgcggtctgcgaacagtacgccgactgcaaagctctgacctatgagctgacccacgcattcatttctgcggtctacatttacgatcttgacaacatagaaatcgtctggaagttcaaggacttcctcactacatcagaaggagaagccaaatgaaagtatttctttatatccgcgttgcctgtgcggatcagcttgcggcagcagaccagtgggaagagctggaacgctatgcgaaggacaaaggctatgaggtggctgctgctgtggcggcagacggcatctccgccgtccatacggaaggtatcatgaacttcctgctgaacgaagccaagcgtcaggacatcggtacgatcctcacccgcgacacctcgcgaatcagccgggacacttcctctttcatgaggtttgagcgaaagttccgggagaacggcatccggttcgagtatctgtccaagcctgacaacgagcttccggtcactccgatgttggaggcatttgcggcggcgtataagaagcgtcgcacaaagaacggcacaagagcgtagagaaaactcaagccgttcatgggtggttgtccacctatgaacggcttgtaaattctcaaaatttttttagtccctacttgacacaagaagatgtaagccgtcaagtacgctgcccaggcgcaccacagccccggccgctttcggacgagaaagcagatgatcccgcacaccagaaacggaacggccaggatcaggccgatgaggatccccccagccccgtggggatcagaaacgccagaaaggccatgcagaagaggatgatcccggcgatcttccgacccggcattgacggagacaccatgaccggaggcgtctccaccttcactgggggctctgctcccgtcaccagttcatccagcgtcacaccgaagagctggctcagcttcatcagcctgttcaggtccggcacactggaatccgtctcccacttactgacggactggcggctcacctccagcacttccgccaggtccccctgagacaggcgtttctccgcccgcaggcggctgatgttggttccaaggctcataccgcgccctcctttgtggttccagtatagcgggagggtgggcaaaagtccaccaaggggacctgaaaatttggcaactgccagttgcacattgccaaaagcccgaaaaacaggcagtcccgtcggccttgcttgacgagaaacagaggaggtgctattctaataaaagaagaacgacgggagggattgctttgaagctggcggagttgcttgacatccgtcccggtgtcactgccgtcatcggcggcgggggaaagaccactctcctgcggaccctgggcgaggagctggccggacagcatccggttctgctgtgcaccaccaccaagattctcccgttttcggacctgccctgcgcccggacagcggcggagctggacgaactgcgcagggcgcatcagctgctgtgtgccgggacagacgtaccgggaacgggtaagctgacggccccagagacgcccatggcggtgctggcggagcaattcgactacattctggtggaggcggacggcgctgcccgccgtcccctgaaggcgcacgccccccacgagccggtgatcccaactgaggccaatcagaccatctgcgtggtgggggcctccggcttcggccgtcccatcgctgcggccgctcaccggccggagcggtacgcgcttcttgcgggtgtgccggaggcggcggaggccacgccggaggccgaggcgagggtgcttcgatccgaagatctgcacacgaaagtttatgtcaatcaggtggagacgctgtggaatctggcagatgccagggttctggcgcgcctgatggactgtccggttctggccggcagtctgtggaggagggagtattttccatgctggtaatcatccgaggcgccggtgatttggccaccggtattgctctgcggctgaaaaaggcgcatatatcggtgattatgaccgatataccggccccaactgccatccggcggaccgtagccttctcccaggccatcgtgttgggagagacaaaggtggaggatgtcaccgcccgccgggcggagacaccggaggcggctatggcccttttgcaagagaatgtagtcccggtgctggcggacccggaggggatctgtatcccagttttgaagccggacgtggtggtggacgccatcctggccaagcggaatctgggcacccggatcaccgatgccccggtggtcatcggcgtggggccgggcttcactgccggggtggactgtcacgcggtggtggagaccatgcggggccacagcctgggccgggtgatccatgcaggcagcgcgctgcccaataccgggatcccggggctcatcggcggctttgccggggaacgagtgctgcgggccccggcggacggcgtgtttcaccagctgctggacattggcgcccaggtgcggcagggggatgtggccgccacggtgaacggcgtgcccatgacctgcaccctggacggcgtcctgcggggtatcctgccggatgataccccggtgcacaaagggatgaaggccggggacatcgacccccgctgcaaggtggagcactgctataccgccagcgacaaggccctggccattggcggcggtgtgctggaggcgattttggacctgacgggagcgctgaaagaccgcgcaggtgggtattccggttaggtgcagcctgtcggggacgatcaaactgaggaaacgggaggaagaatcatgcctgaaaatgatgtcaagctgacgaagctggccaagtgtgccgggtgcggcgccaaagtgggggccggtgtgctggcccagctgctggacggcatccaggtgcatcgggaccccaatctgctggtggggttcgacaagagcgacgacgcctcggtctataaggtcagcgacgatctggccctggtgcagacggtggatttcttcccgcccattgccgacgacccgtacctgttcggacagatcgcggccaccaacgccctctccgatgtgtacgccatgggcggcgagcccaagctgtgcctgaacatcatggccgtgccggagtccatgccgaaagaggcggtgcaccagctgttgcgaggcggctatgacaaggtgtatgaggcgggggcgctcatcaccggcggccacagcatcctggacgacgagcccaagtacggcctggcggtcaccggcttcgtccatccggaccgggtgctgaccaactccggcgcccggccgggggacgtgctgttgctgacgaagcccatcggcattggcgtcctcaccactgcacagaaggcggagatgctgtcggtcgaggggcgggctttggcagaggaactgatgaccaccctgaacaagtccgcccgggacgccatggtgaagtaccgcgtccacgcctgcacggatgtaacgggctttggcctgctgggccacagctatgagatggcccagggcagcgatgtggagctggagctggaggtggacgccatcgacctgattccggaggcgctggagtttgcaaacatgggtctgctgccggcggggatgtaccgtaaccgcgcctttgcggaggcgggcgtggatgcaggggagaccgcgctgtgcagacaggacctgctctatgatccccagaccgctgggggcctcctcatggccgtggacccggcggacgcggaggcgctgtatcgggagctgcagggctgcgtccccagtgcccagcggatcggcgtcgtgaaggcctaccgaggcgggaaacgcatcttcctgcggtgaaagtcgaaaatgggaaacaggtgcctgccggatttctggcaggcacctgttttgcgcccgtaccgggcggaacccttaaacgggcaggcgcaggagcgcggcggcggcctggaagtagatcagcaccgccccggcatccacaatggtagtgatgaggggggaggccatgatggccggatccatgtggagctgcttggcggcaatgggcagcatacagcccaccagcttggccagcaccaccgtggccgccagggacagggagatcaccagggcgatggcgctgtcatggtactgaaggtagatccgcaggccgttggccgcggctaggacggcgctgacgatggcggctaccgccagctccttgcggatcacccgcagcgcgtcccgggggcggatctcttccagagccagcccccggatcaccagcgtggcgctctgggagccgcagtttccgccggtgtccatcagcatgggtagaaaggccaccagcaggggcacggcggagatggcgtcctcgtaccgggtgatgatagagccggtgatggcggcggacagcatcaaaatcagcagccacactacccgatggcgggcgtgctcccaggcggaggcggcgaagtagggcttctcgtccggcgtcaccgccgccatgatggagagatcctctgcggcggcctccgtcaggacatccatggcatcatccacggtgacgatgcccaccatccgctcctctccatccagcaccggcaaggccagcaggtcatatttcgccaggagccgggcggcctcttcccggtctgtgagcgtacccacagataccacatccgtgaccatcaggtccgccacagcggcatcctccgcggctgtcagcaggtccttggccgacaccacgcccagcagctgccggtgctccagcacatagcaggtgtagaccgtctccttgtggattccggtgcggcggatggtatccagcgcctgccggaccgtatcgcccggccggagggagacaaactccggcgtcatgacgctgccggcactgtccgccggatagcgcagcagggcatttaccgccatacggcgctgagggctggcggagcggaggatgcgggtcaccaggttagcgggaagctcctccagaaaatccgccgcgtcgtccagatgcagggcgtcaaaaatctgctgcagctccccgtccgcgaaagagcgggccagggtggcctgagtgggaccggggagataggagaacacatctgccgccaggtccttgggcagcgtgcggaacaccgccgcctgccgggcaccgtcctccacggagtccaggagggcggcgatgtccacggcaccgcggccctgccaaagggcgcggagcgcctcgccgtcccggctctccaaaagctgaaagatctgatccttgttgaacatggtcatagtcgttacctcgctttcgtctgtattgtctgggtggctgactggcactttccatggtccgcacctcctttctgcataaaactctatgcgcgctcgcgcgttaggaacatcggctgtgtgaggttttgcgcatcctttccagctgccccgaagggacggggaaatggcgcgtttgaatttttggccgtgcttttccgcagcaaaaaaatccctgccggaaatccggcagggagagctgcacacaatgggcgtcttcgtccaagctttagcttcacggggcgtagcaactgcgttaagcggcgccttgttgtcgacgcggcctgttgaccagctggttgtgtctccacaactgtgcggcagcagtctttggatgattccgaatccccgtggtagcctcacctaccgattcgccgtcattataaccgcctggacggacgtttgtcaaccccgtcgcctcaaaaaatttttcgccatggcctcacagcgccttccggtgctggttcatgatacgggcgaacagcacgccgttggagggcggggtgtatgtaatggcattggctccggcctggatggtgcggaggatcgactcctctgtggggccgccggtggcgatgatgggaacctccgggaagtcccggcggatctccgccacgatctccggcgtggcggcggcgccggagacattgagaaagtcggctcccgcctccaggcggctgccgatgtccgtgtgagcggagaccaccgtgatgaccacgggaatgtccaccacctttttgatctggcggatgacatcgtcggaggtgggggcattcagcaccacgccgtaggcaccctggtgctcggactggatggccagccggacggagcgggagccggtggtgattccgccgcccacgcccacgaataccggcacgtcggacacgctgatgatggcctgggagatcaccggctggggcgtgaagggatagacggcgatgatggcgtccgcgttgatgttcttgatgatggctacatcggtggaaaaggccagggacttgatgcgccggccgaaaatgcggatgccgctgcactcgctgacgcaggcggggatggtcagggagtgattgcgcagcgtcccagtgtaggaggggacctgttttgccatagggactcctttctcctggcggcagaccgccgggcacaggtggttgttcacaggcaaattataccgcaggaagccacgcgggacaagcccggatccgggcttgctttttttccggcgggagatatactgttaagagacgagatgtgtcgggacggcacaggggaacaggaggacggctatggatcgcttttccattctggtgggagatatcacccgttcggacgcggaggccattgtcaacgcggccaatcccacgctgctgggcggcgccggggtggacggggccatccacgcggcggcggggccggagctgctggcggagtgccggacgctggggggctgcgagcgggggcgggccaagctgacggcgggctaccgcctgcgggcccggtatgtgatccacacgccgggtcccgtctggcagggcggggagcagggggaggcggccctgctggcctcctgctaccgcagctgcctgcttttggcggaggcccacagcatccgcaccctagacttctgctccatatccacgggagtctacgggtatccgttgccgctggcggccaccgtggccctgcgggccatcatggacttcctggcggaccatgccctgccggagcgggtgcggatggtctgccattcggagcaggcggcagaggtctaccgccggacctggaacctctggtacgcggagggcaaggaccagcggatgtaaagaacgccggagcgggacctttcccgctccggcgtttgtcactcttcgtttcttttgtcactctttttgacctttttgtatccgttttgacccgatttttcccggggcattccgtatgatagactcaaataagagatgaaagaaaggtatcccatcatgaaacgactggtttcccttctgctgtcctgcctgctgctgagctcctgcggcaccattgtgacccccgccaagaccccgccggagcatttggtgtcagaggcgcccccggctcaggttctccccgctcccggcgagatgccggagctcctcccggacagccaggaggcaggcggggagaatgcttcggagccctccctggaagagggtggcggaactcccgtggagacgctgccggagccccagcgggtggtggatcccacccgccccatggtggccctgacctttgacgatggtccccacgcggtctacacggaccagattttggatattctggaggagcacggcgcggtggctaccttcttcgaagtggcgcggaatctccccaaggcgccggaggcagtccgccgggcggcggacatgggctgcgagatcggcagccactcttaccgccacgcaaacctgggcaagatggatcaggccgcccagcaggcggatcaggccgcggcggacgcgctgtttcaggaggtgctggggaccacgcccgcgctgctgcggccgccctatggctccatgaacaagacgctgaagaccacctccggccggagcatcgtcacttggtccatcgacacggaggactggcgctccaaggacgcggagaaggtggtggccggcgtggagaacgccgggaatctggacggacaggtgatcctgctccacagcatctacgagagcacggtggcggccacggaggtcctggtgccctggctgctggagcagggctaccagctggtgacggtcagcgagctgatccagctgcgctttggggacgaggtggagcccaaccgcacctataattacgactacttccgcttccaggtgccgcccctgcctgcggagacggcgcccgccgccgcatgagcggcaggcaaccgacggttgctttacgccgctgccctgctgtgatagactggtcccgaggtgatgggaatggagtttcaagaggtgttcgcccagctgcggcagcggacgggtctgtcccagagcgaggtggcggagcggctgtttgtcacccggcaggcagtgagccgctgggaacggggagagacgatcccggaggtggagacgcttcaggcgctgtcaaggctgttcggcgtgtccatcaacaccctgctgggcagtccccggaccctggtctgccagagctgtggaatgccgctgaacgatgacatcctggccaaaaacacagacggcagcttcaatgagcagtactgcatgtggtgctgggatggagagggctttgcccaggactgcaccatggaggagatggtggagcactgcctgccccacatgcccctgggccggacggatccggaggcgtgccgcgcctatatgcggagccttctgcccacactggggcggtggaaagagaactgacacaggcgccggactgcggaaacccgcggtccggcgcctggattttttcaggacagctgcgcaagacagctttcgcacacatagatcccatgggggagctgcctgagagaatccgcagcatggcagcagatgcaggaggggaattctttcttcaggattaccgtgcgggatttttcatccagaaaaaacattacggtgtcccgctcatttagagacagagcccggcgcacatctatcgggatcacaatccgtcccagctcgtccagccttctcggtattcccacgtttttcatatctgacatcctcctttttcgacaatttgcggttctatcatactaaaattccagaatatagtcaatatttatatgaaatataggatgttcaaactggaataactcatactatacactgtacctgaaatggggtatggtgatgattgatacaaaagctatcggaaaacggattcaggcactccgcagggcggctggtatgacccaggagcaagcggcggagactctgggaatcagcccaaattatgtgtccaatattgagacgggacgagatatctgttctactgttgtcctgctgggcatggcgaatctctaccacgccagcgtggattatatgttgggggagagtctggaatacaaccggcggaagggagaagcgggagagaatcggacggcgctgctccacgaggtcagacgtctgcaagaggcggagtgtggccatctgctgcggtatatccagttgatgcgggcggacgagactgaaatccggaattgaacaaccgctcctttataatttataaatagaaaagagccgctgcatcaaccgatgcagcggctctttttacgcctttgccagatacgccccgcaggcattccgggcatcggcggcggttttttcctcgtcgatggtgacgagatgcccctccttcaccacgacccggccgttcaccaccgtgtagtccaccgggccgcggaggcctaccgtggccagcacgtcggcgggactgtacgcgccgcccaccagctccagtcggcgggaatccaccaggaagaagtccgcgcacttgcccacggccagctgcccgatgtcctcccggcccagcagccgggcgctgccccgggtggccatcttcagcacctgatacccggagggggccttctcgctggaggtcagccggtggagcaggtagcacacccgcagctcttccatcagggacgacccgtcgttgctggcggagccgtccaccgccaatcccaccgggacgtccagcgccagcatctccggcacccgggcgacgccggaggccaacttcatgttgctgatggggcagtgggccacgccggtgccggtgcgggccagctcccgcagctcctcgtcgttgaagtggatgccgtgggcgtaccacacatccgggcctgtccagcccagagatgccatgtactccagcggccggacgccgtagtgctccagggtgtagtgctcctcgtccctcgtctcacacaggtgggtgtggagccggacgccgtactgccgggccaggatggcgctctgccgcagcagctctccgctgacggagaagggggagcagggggccagggccacctgccgcatggatccgaaggacgggtcatggtacgcctcgatcacccgggcggagtccttcatgatggcgtccaccgtctggaccacgctgtccggcggcaggccgccgtccttgcgggagaggtccatgctgccccgggaggcgaacatccgcatccccagctcctccgcggcggcgaactgggcgccgatcaggtctccgcatccggcgggaaagacatagtggtggtcaaagcaggtggtgcagccgtgcttcagcagctcccccatgccggtgagggagctgaggcgcaccacctgctcgtccaggcccttccagatctcatacagggcggtgagccagtcgaacagctccagattctgcacctggggcaggttccgggagaacacctgatacaggtggtggtgggtgttgatgaggccgggatagcaccagtaatgggacccgtcgatcacagtgtctgcggtctggggcaggtctgggcccagaccgcggatgatgccgttttcgcaatagaggtcggcgtgctccagcacggcgtcgccgtcatcacaggtgaggatggtccgcagattgcgcagcagcaaagaggacatggcggtcacgctcctttctgctcccagtataaaggacggcgggagaaaggtcaactttcccgggaaaacttcttgcggaaacggggaggatgtgatacgctgagagcaatttcggatcaccgggaggaacacggttatgctggacatctttgatattctgggccctgtgatggtgggcccctccagctcccatacagcgggggcggtgcggatcggccgcatggccaggaccctgctgggggcggaagtggcgcgggcggacatcggcctccacggctcctttgccgataccggccgaggccacggcacggaccgggcgctggtggcgggcctcctggggatgaagccggacgatctgggcattcctcagagctttgagatcgccgccaaccaggggttggaattccacttccacacggcccgtctgcgggatgcccaccccaacacggcggtgctgacggtggagagtgccgacgggcggaagctggagctgcaggcggcctccaccggcggcggccgcatccgggtggatcggctggatggagtggaggtgagcttcaccggcatcttcaacaccctggtggtccgccaccaggacgtggccggagagctgtcccggattctcaatgagctctccgtcagcggggtgaacatcgccaacatgagcctgaaccgggaccgccggggcggcgctgccctgacggtggtggagacggaccagaagatcccggcggatgccctggagcgtatccaggcgctctacggcgtcttgggcgccacctactacgagaaggaggaagactgaaatggctctggattccatgcaggagatcttcgacaagatccaggcggggcggaagcccttctggcaggtggtgcgggatacggacgtggaggagcggcaggtgacggcggaggcctcctttgagaagatgcacgccacctggcgggccatggtggagtccgtggacacctaccgggcggaccggcgcagcgtcagcggcctggtggggggcgacgcccagaggatgtgggactacgccgcccagcaggagacgctctgcggcccctatctgcaggaggtgatcgctacggccctgtgcgtggcggagtccaacgcctgcatgcaccggatcgtggcggcacccacggcgggggcctgcggcgtgctgccggctgtgctggtgccgctgtaccgccggggcgctgtagatgaggaggccatcgtccgggcgctgtatgtggctgccggtatcggcgcggtggttggctaccgggcgtccatctccggcgcctccggcggctgccaggcggaggtaggcacggctgcggccatggcggcgggggccctggtggacctgcggggcggcgggccggagcagatcggccacgccgtggcgatggcgctgaagaacctgatgggcctggtgtgcgatccggtggcgggactggtggaggtcccctgcgtcaagcgaaacgtcatcggcgcggtgaatgccgtcagcgcggcggacatggccctggcgggcattgagagccgggtgcctgtggaccaggtgatcgactgcatgggcgacgtgggccgccggctgccggtagagctgcgggagaccgctctgggcggtctcgccgccacaccattcggacagagcgtgaaggcaaagcgggaagagcgccgctcccaggaacaggagctgtgaggacgaaagaaggacctgccctgcggcaggtccttctttttgcgaaagggaagatcaggcgttccggctggccaggactttctggaaccagtccttgccgtctacaaagcgggagaccaaaaagctcaccacatagtcgccggcggagttgatcatggtagcggggggatccaccaggtttccgatggtgatggcgatgggataggcgatggccagctggtccgggaagaacacggagcacatgatgaactcgccgatgtagccgccgccggggacgccggacatgcccacggaggacagcacggccacaatcaccatcagtgccatgtcgccgatgctgtcaaagggccggccgaacacgccgaagaggaacgtgatcttcagaatgcaagagaagcaggagccatccatgtgcatggtggcgcccagaggaaccacgatctcgctgacatccttggagataccggtggcctccgcctcttccatgttggtggggatggtggccacggaggagcaggtgcccagggaagtgatggcaggtttggcgatgtgccggaacatttccttgaccgctcccttgccgccgccgaaccaggcgaacaaggggaaggccacaaaaatataaatgaagcagaggggatagtacaccaccagagcccgggcatagtccgtagcgatctgggagccgtaggtggccaccaggttggcgaagaagccgaagaaggcgatgggggcgtagtaggtgactagctgaacgaccttcatcatagcttcggacaggctggtgaggaatcttgcaatcaggctgtcaggacccggccccagatttacgccgaagccgaacagaatggagaagacgatcaggggcagcatggcgctgcggctgagcaggccggagaagtcgctcaccgtgaagaagttcacgatcaggtccgggatggagatgggatcctccaccacgccctcagtcaggttggtccagggctccagaaccggggggaagatcttcataatgacgatcatgatgaccgcagcgatggcgccggtgatgacgaaggtcagcacggtggtgcccatgatcttgccggcccgtttgcggctcttcatggtagccacagacccggcaatggacgaaaacaccatgggcaccacgatgcagaacatcatattcaggaacagggtgcccagaggttccagcaccgtggcgccggcgctgatgacgttgccctccgcatccagctcctgggggaagatccagcccacgatggagcccaggatcatggcccccagcatgacggccagaaatgcgtagttccgggcaacagactttttgctcagctgtgtactcattctctctcctccaatacatattgaaatagctgctgacctatatggccttccggccttacattataataaggtcctcatccgtaacttcacccctgcacaccacgttggtggggcctgtcagataaaggctggcgatatgggagtggacccgctccgcatcgatcaccaagcggccgccggtcatatccacctgtacgccgtggccggagactttgccctgcagagtcagcacggtcaccacagatccggtgccagtgccgcaggcataggtgaagtcctccacgccgcgttcaaatgtccgctcgaaaatcagatcttcaccggtgatctcgtagaagttcacattggcacccttgggaaagaccttgttccagcgaatagcccggcccagctcccgcagctcgttttcgtccgcctggcgcagtccggcgtatggcaccacggcgtgggggatgccgggatttcccagctccacataggagcagacgtatgtcacgccgtctgcctccaccgggctatccagtcgtacggtggtggggtcgttcagccggatgcggtacagccgctggtcgatccgccggccggtgacgatgcctgccgtggtctccacagtctgcgtctctccggccagcccgttttcgtagccataccggcagatgcagcgggcaccgttcccacacatctcacctacgctgccatcagaattatagaacagcatccgataatctccgccctgggagggggcatccacaaccatcaacccgtccgccccgatggacatgtgccgttcacacagcgtccgggcgatttgtggcagctgctccagggggaggtgctcctccaggttgttcagaatcacaaagtcatttcccgcgccgttcattttccaaaatctcaagtttccacctccttcttgtatatacattattataacagcgagaactgagaatgaaaagcagagaatgtgcggaaaaccatgcagaacctgcgaaatccacgtcagtgggaagacggtcgaaaaaaatcgagaaaagaggaaaaaggtattgacaaaaggggaaggatttggtattctaacaaagctgtcggcgcggtgatgagccgggccgggaagaaatgaaaaaagttcttgacagcaaggctgagatgtggtaacctaaacaggttgctgctgatacgagatggatcggatgtcaaaaaacttctgaaaaaagttcttgacaaacgaaatgaaatcgagtataatagcaatgttccgccgggaacggcgtgcaccttgtaaattaaacaacgtaacgaaaaggaagcaccagaaggcgagctcatttagatgagtttgccaaaggacaaagccgtctcactgggttgagtcaattaccggtgggatggagaaatgaagctatgacaaatagctctatgaaggtttgaacggactacggttcgtttagataccattttatagagagtttgatcctggctcaggacgaacgctggcggcgtgcttaacacatgcaagtcgaacggagcacccttgactgaggtttcggccaaatgataggaatgcttagtggcggactggtgagtaacgcgtgaggaacctgccttccagagggggacaacagttggaaacgactgctaataccgcatgacgcatgaccggggcatcccgggcatgtcaaagattttatcgctggaagatggcctcgcgtctgattagctagatggtggggtaacggcccaccatggcgacgatcagtagccggactgagaggttgaccggccacattgggactgagatacggcccagactcctacgggaggcagcagtggggaatattgggcaatggacgcaagtctgacccagcaacgccgcgtgaaggaagaaggctttcgggttgtaaacttcttttgtcagggaagagtagaagacggtacctgacgaataagccacggctaactacgtgccagcagccgcggtaatacgtaggtggcaagcgttgtccggatttactgggtgtaaagggcgtgcagccgggccggcaagtcagatgtgaaatctggaggcttaacctccaaactgcatttgaaactgtaggtcttgagtaccggagaggttatcggaattccttgtgtagcggtgaaatgcgtagatataaggaagaacaccagtggcgaaggcggataactggacggcaactgacggtgaggcgcgaaagcgtggggagcaaacaggattagataccctggtagtccacgctgtaaacgatggatactaggtgtgcggggactgaccccctgcgtgccgcagttaacacaataagtatcccacctggggagtacgatcgcaaggttgaaactcaaaggaattgacgggggcccgcacaagcggtggattatgtggtttaattcgaagcaacgcgaagaaccttaccagggcttgacatcctactaacgaagtagagatacatcaggtgcccttcggggaaagtagagacaggtggtgcatggttgtcgtcagctcgtgtcgtgagatgttgggttaagtcccgcaacgagcgcaacccctattgttagttgctacgcaagagcactctagcgagactgccgttgacaaaacggaggaaggtggggacgacgtcaaatcatcatgccccttatgtcctgggctacacacgtaatacaatggcggtcaacagagggaggcaaagccgcgaggcagagcaaacccccaaaagccgtcccagttcggatcgcaggctgcaacccgcctgcgtgaagtcggaatcgctagtaatcgcggatcagcatgccgcggtgaatacgttcccgggccttgtacacaccgcccgtcacaccatgagagtcgggaacacccgaagtccgtagcctaaccgcaaggagggcgcggccgaaggtgggttcgataattggggtgaagtcgtaacaaggtagccgtatcggaaggtgcggctggatcacctcctttctaaggagacctgggcagagcaagctctgcctggaattcctggtcagctggagcggaaaaagagttacgttgtttaatttagagggcgtacgccgggagatagaaggggatatagctcagctgggagagcgcctgccttgcaagcaggaggtcgccggttcgaacccgactatctccaccaagagaataaagcgtcacctcgtccaagacgagggcccgtagctcagctggctagagcgtacgactgataatcgtaaggtcggtggttcgagcccactcgggcccaccaggcgatttgcctttggatttgaagacctgatcgaaagatcggatcttcaaatctgactgcaaaagcggttggaagctgtgccggagacaagcgaaagcttgcggacggcgatctgcaccttgaaaactgaacaatgtgacaaaagcaagtaaggcaacagagaggtttctctgtggagacacagaggaaacaaattgattgtggaacagcatccgaaaggatgcagggtgacatacaatttcgatctttgtaaagcctgcataattctcaaagagaaccaagaattctctgacaagtcgctgtgagaacggcgataggtcaagctggaaagagcgcaaggggaatgccttggcatcaggagccgaagaaggacgtgacaagctgcgaaaagcctcggggaggagcaaatatccattgatccgggatatccgaatggggcaacccggctggacaatatccagtcatcctgcgttgaacaaaataggcgtaggaagggaaccgcctgaactgaaacatctaagtagggcgaggaagagacatcaaccgagattccgcaagtagtggcgagcgaacgcggaagaggccaaaccgagggatttattcctcggggttgcggacagtcatttagcggaagttatctaggagaagggtctgggaaggcccgccatagagggtgagagccccgtatccgaaagagaaggccgtgcgactgaatccagagtaccgcgggacacgtgaaaccccgtgggaaacaggggggaccaccctccaagcctaaatactacctgatgaccgatagaggagcagtaccgtgagggaaaggtgaaaaggaccccgggaggggagtgaaagagaacctgaaaccttgtgcttacaagctgtcaaagcacgttaacgtgtgatggcgtactttttgtagaacggtccggcgagttatagtaacgagcgagcttaaggcattcagtgccggaggcgaagcgagagcgagtctgaatagggcgtaaagttcgttgccatagacccgaaaccgggtgacctacccatgagcaggttgaagtgggggtgaaaccccatggaggaccgaaccgacccccgttgcaatggtggcggatgacttgtgggtagcggtgaaattccaatcgaactcggagatagctggttctccccgaaatagctttagggctagcgttatgttagattaccggaggtaaagcactgaatggtagcggggccgataaggttaccaacgcctatcaaactaagaatgccggctaattgatgcatagcagtcagacagtgtgagataagtttcattgtcaaaagggaaacagcccagacctacagctaaggtcccgaatagatgctaagtggaaaacgatgtggagttgcgaaaacaaccaggatgttggcttagaagcagccactcattaaaagagtgcgtaatagctcactggtcgagtgactctgcgcggaaaatgtaacggggctaagcatctaaccgaagcttaggattgtcgtaagacagtggtaggggagcgttccatgtggggtgaagtcgcagcggaagcagcggtggactgcatggaagtgagaatgccggaatgagtagcgagaattatgtgggaatcataatggccgaaaatctaaggtttcttggggaaggttcgtccgcccaaggtaagccgggagctaaggcgaggccgaaaggcgtagtcgatgcacatacggtagaaattccgtagccaccgaactttaagtcagagggacacttttggatagcggaacccgggcgttggttgacccgggcgaaagggagcgaaaatatagtagcgaagtccgcgatgctgagaggcgagaaaagctctgatggatactaaggtgcccgtaccgcaaaccgacacaggtagatgaggagagaatcctaaggccaacgggagaagggttgttaaggaactcggcaagttgaccccgtaacttcggaataaggggagcctcgcaagaggccgcagtgaaaaggcccaagcaactgtttaccaaaaacacaggtctatgctaaatcgaaagatgacgtatatgggctgacgcctgcccggtgccggaaggttaagaggagatgtcagcgcaagcgaagcattgaattgaagccccggtaaacggcggccgtaactataacggtcctaaggtagcgaaattccttgtcaggtaagttctgacccgcacgaaaggcgtaatgatttgggcactgtctcaacagcccgcccggcgaaattgtagtactggtgaagataccagttacccgcaactagacggaaagaccccatggagctttactgcagcttaatactggaattcggtaacccatgtacaggataggtgggaggcttggaagcaggggcgtcagctcttgtggagccgccggtgggataccactcttggattgctgaatttctaacctgcggccgtgaatccggtcgggggacactgttaggcgggcagtttgactggggcggtcgcctcctaaagagtaacggaggcgctcaaaggttggctcagcacggacggaaatcgtgcagtgagtgtaaacgtagaagccagcctaactgcgagaccgacgggtcgagcagtaacgaaagttggagttagtgatccggtggtatgtgagtggaaatgccatcgctcaacggataaaagctaccctggggataacaggctgatctcccccaagcgtccacagcgacggggaggtttggcacctcgatgtcggctcgtcacatcctggggctgaattcggtcccaagggttcggctgttcgccgattaaagtggcacgcgagctgggttcagaacgtcgtgagacagttcggtccctatctgttgcgggcggaagagatttgaagggagctgtccttagtacgagaggaccgggatggacgtacctctggtgcaccagttgtcctgccaagggcatagctgggtagctaagtacggacgagataaacgctgaaagcatctaagcgtgaaactccccctaagatgagatctctcacctcgaaagagggtaagggcccaggaagactacctggtagataggccggaggtggaagtgcagtaatgtatggagctgaccggtactaatagcccgagggcttgacctacgagaaagcaggcgagcctgaaagcagcgtcacattgttcggttttgagggtgcagggaagcatgctcaagggatttgcacctttagctcagttggtagagcaactgactcttaatcagtgggtccccggttcgagtccgtgaaggtgcaccatggcccgttggtcaagtggttaagacagcggcctctcacgccgttaacatcggttcgaatccggtacgggtcaccagacttttcaagggcgaaagttcttgacaagggaagcgaaatacaatataatacagtttgttctccggcaagaccggatgacatagagttggtgctgattagggcgagggtccacccgttcccattccgaacacggcagttaagctcgttcctgctgacaatacttggctggcgacggcccgggaagataggtagcgccaacactgagaggccacatcgtttgatgtggccttttttcgtcgcatgggaggcatcgttttgcaatatcatcaagtggtcaaaggaagatttctacggcggcccaaccgttttatcgctcatgtggagacagaagacgggctgcagatctgccatgtaaaaaacaccggacgctgccgggagttgctggtgccgggagcagcggtctatctggaaaaggccgcaaattctgcgagaaagacagcgtatgaccttatcgccgtggagaaaggggccttgctgatcaatatggatgcgcaggccccaaatcgtgtttttcaggagtgggccgcccaaggacatttcctgccagatctaaagtccattcaaccggaatatcattatggagagtcccgtctggactttgcgctgacaacagaagccgggctgcacctggtggaagtcaagggtgttaccctggaggaaaacggtgttgtccgatttccggacgcgccgacagaacggggcgtgaagcatattcacgagttacagcgggctgtccgggagggaatgggcgctaccctgttttttgtgatccagatgcacggcgtggatcgcttctctcccaacgacgccacccatccggccttcggtgcggcccttcgggaggcagctgcctggggtgtccaagtgtacgcctatgactgcctggtgacgccggacagtttaactatccaccagccggtgccggtggtattataagggagcggcaatatgggatttttggaattgctgttgatcggcgtggggctctcgatggacgcctttgctgtagcggtgtgccagggactctgtatgccaaaactgaatctgcgctatgcggctgtgattgcgctgttttttggcggatttcaggcgctgatgccctatgccggctggctgctgggcgcccaatttgccgggtacatccaacatctggaccactggctggctttttttctgctggcattcatcggcggtaagatggtgtgggagtctttgaaaggggaggcggaggagacggcctgtgcggtgagtgtgacgctggattataagcagctgctgctgatggcggtggctaccagcatcgacgcattggctgttggggtcacgtttgcatttttgaacgtggacatcctgcctgctgtgacggtcatcggctgcacgacttttgtgatctccctggcgggtgtggtgatcgggacctttttcggcgcccgcctccagtgctgggcggagatcgccggcggtgtgatcctgatccttctgggtggaaagattcttctggagcacctggggatcctgtaagcgcctataaaaaacagcgaagtggaaaacgccccgggccatttggcccggggcgctggttatcttatgaaatctcagcagcagggattgggattgcagccgcagttgttgttgcagccacagccgcagccgttgccgccccagctgccgttgccgcagcagcaccaaatgatgatcagcagaatgatgatccagcagcagttgccgccgccaaagccgttattgcacataccggaacctcctatgaaatcgtagaccgaccgaaccggtctcaatccatagtatgccggaccggcaaaggggttccggttttatttccggccgctggtgacgagtgcgtcggccgcctgtttctcccgcacggtgaagacgcccttgtccatcagcgtgtctcccagtgtctgcctgctgccggacaccgcggcatccagcgcgtagtaggagacgtatgcgagatccgcacggaggaacgtgccgccctgcagggcggccagctcgccctccgtgatgacgccattggtcaaggcattggtcagtgtgccggagaggtccttgttgtccgcggagctgtatcccagtgcccggaggatgaactccatgtattggctggctgtcaccgtctggctgggccggaaggtggtggcggagtatccgttggtgtagcccttgctgtatgcgtagcccacgtatttctcgctctgggtcccggaggtgatgtccgtgaagggagtggagccggtgtaggccagcgcatcattctcctcgcccaggacgcggatgaacatgatgagggcttgcaggcgggtaggggcgacctccaggtcatatccatctccgtagccggtgaagctgccttgaaacaggtgcatggtcttgagcgcgacagcaatggcgttgtagtccgtgttggtggagtagctgaaggcgtaggggccctgataatccacaaccgccgtcttggaggtgacggtaaacacggcggtggtttcctcagccaccagataccggtggctggctgtaagggcactgccactggtaacgatggtccctgtggtgacatccaccacagcgccggagttgaacgtgacctgcataccgcccgccagcaacaggacgcccgtgccggtggagccggtcagggcgtcgcctgccttcagacgggtctccatccacgtggcggccccgccgtcggaaggagccgcgtctccgttcagcagcgcttggtcagaggcgtccagtttttcctccacccgctggtctaccgcatcggtgaaagtgccggtgagataggagagggaggccagcggatcggaggccccgccggccgcggccaaggcgtacacaacggtgacggtaagtaagaggcagacggtgatgagggcagtcttggtcttccttgtcatagatgattcccttccacgctggagcgtcagcggttggcgatgcggtaactgagggtcaggaggctgtctgcgaagtgaatgttctcaaactgcacatccgggagctgactgctgagctcaatgttggtaaagttccaaaagcccttgacgcccagattgatgaggtggctggcggtgtcctgggccacggactggggaatggtcagcaccaccacgtccaccgggtggtcctgtaggaagtgatctagctcggacatggcgtataccggcacattattcaccacagtcccgatcacggcgggggagacatcaaaggctgcgtccaccgtaaacccactctgggagaatgggaagttctgcagcagtgcgtggcccagattgccaacgccgatcatgatgaggtggtggttgttgtccacgcccaggatatgaccgatctcggcccgcagttcttctacattgtagccgtagccctgctggccgaactcaccgaaacagctgaaatcctggcggatctgagaggcggtgatgttcatctcctgccccagggagtgtgaggagatgcgcacgacgccgcggttgcagaggtctgtgagctggcggtaatatctgggcagacgccgtatcacggcgtcggagatgttttcctttcgcatataagtcactccttgctatttgttaaatcattctcaattaagtttagaccaaaatcagggacttgtcaatttttttaacaatctttttgagaaaaattttttcaagaaaagctttacaaagcggaaaaatgttggtatactaaataagctgtttgaagaagatgttgatgtatgcgcctgtagcgcagttggatagcgcgtcagactccgacatttcaggctcgttcagttgagagatggcgcaaagcgttgggagtctttggttttaacgggcagagagaaaaaattctgtttccgttgactactatttgactaccaattttgaaaatcccgtgttataatagaacatagtttaggtatgcgcccgtggcgcagttggatagcgcgtcagactccgactctgaaggccgctggttcgaatccagtcgggcgtaccacgtgcaaagaggcactcgaatttcgagtgcctctttgcttttatcaatcagaggtgatgaactatggagaaacccatcatcggggtaacgcccctgtgggacgaggaaaagaagtcctactggatgctgccggggtatctggaaggagtgaaggaagccggtgccatccccgtcatcctgccgctgacaaccaatggggcggatattgcccagctcgcggatctctgcgatggttttctctttactggtgggcaggatgtcgatccccagctgtacggggaggccatggagcccttctgcggcgagctgtgccctgcccgggacgctctggagcaggagttactccgacaggctttggagcgggacaagcccatcctgggcatctgccggggtattcagttcctaaatgcagccttgggcggaaccctttatcaggacctgcccacggagcacccgtcagagatcgggcattccatgaagccgccctacgaccggatggcccacacggtgcatatatggccgatgacgcctctggcctctctgctgggaaagacggaactggaggtgaacagctgtcaccaccaggcgatcaggagtttagcccccagtctcgtagaaatggcccgcagcacagatgacctcatcgaggcgatgtatctgcccggcaagacctttgtctggggcgtccagtggcatccggagatgtccctgcaggaagagtccagcaggaaaatttttgaggcgtttgtcggggctgtccaacaaaaatgagctgccatcgaagaattaccccccgtccaaaggacgggggatttctttctgttgccgctttcactcagccagaggaaacctccgcggctccgccacacactggtacagcacagcgtcgcagttccggtaaatgatatacttcagccggttgctcgggggtccattccgccggaaggtcacgatggcctcgttctgttgccagccgatccccaggttatacgatccgcaccaggcgcagtggttgacggggatctgcggctgtttcgtttctctgtatttcatcaaatctccagtccctcctgcagaacctgactggccgctttcttgttcttattaaatgcgtgtgtgtagatgtccagcgtagtggagggctgactgtggcgcccagcagtcccgccactgtggctacgtcggccccgcccgcgatcaggaggctggcgttggtgtgccgcagggagtggacgttcagggcagggggcaggccgtgcttctttaagatcagcttgaaccgccaggcgaaggtggagggcgtcatggggagccggtctccgtgacggcggaagatatagtccgtatcctctaattcccgcccatcatacgtttccgtctcccaggcgcactcccgctggaactcctgcagcagggacaccatctccagagagaagtaaacataccggcctccggccacagtctttgtctccttggcgatgatatcctcgccggtgacctttaccacattctgctggatgtgaatggaccgctcatcccagttgatgtcgccccactgcaacccgcagcattcgccccggcgcatcccggtggcgatgatgagcttgaagtaggtctcgtacttgaggttcccctcctccagtacggcaatgagctgctgggcggtggcctcgccagcgatcaccttctctttctttttcccggtatagtggtatgtccgccaagccggggtatggtccagaaagccgccctccatggcatctgagaggatcgtacacagcgttgcgtgtacaccctccacagtgcactcggagagcggctttcacgttctttgattcttcactttccgaagaccggagtggagctgccggaaatactccggccgaagttccgtcagcttgtagtgccctaggactggcaggaagcaatcaatgtcctgccggtccctggccggggtaggcttggtcagcttgccgggagcgatctcacggagccacagctccgtgtacttcgccagtgtaatactccactccacttcttcctgaggaagcgacctgcaacacttgacaaaaactgccgaaagcatattgctttcataaacgtcaaatacgggaggatataaaagatttcattgatctggcgagccggttgaaccgagctgtgtgagcctgaccactatttgcaaaaaggcccggagccattgcatcgcaatggctccgggcctttttgcaaatgacgagaaacttgtacaaattcactgaaatccttgcattgcggaggctttcttgcttttaacgcttatcagtattttgacagagaattggcttttgaccagttccagcgttcaacggaatttgcggagaacgctgtcgcaagatcgtcccaatatatggagtaatagacaagatgttgttaaatggtatcaaaataatccgtggatccgggttgcccatcagaggtcagcaaaagcaggcaaccaaaaaaattctgaaaattatggtaaggagaatcaaacacaccgccgaacctttcacgcattttttcaatccggtacacgactgtatttcgatgtacatgcagttcctgggccgtcaaagccaagctctgtccgtttttcagatagataaacaatgtttttacatagtcggactgattgtctatatcgtatgccatcagattacgcaaaaaagcactgacatagtccgtccgctgttctgcggggatcgaggcagcaagccgccaaagcctgtagtcatcatattgggcgatcctggcatcactcccggagatcctggccattttttctgccatggcagcctgattaaagtaacgccggatctcatacaggtctgagaatgtatcactgataccggcgcacagatcatgctctgacaggtatccctccaactgctgcaatccgtcctgcggaatttgcctgctttttccgcactccaccagtaagaccacatattctcggaaaaacagggaccacgcctttggaaagatcgttcccaaacgtgccttgaaatgccgctctccggagactcgagaagaaaacgcgtgcatattgataccgatcagggaataaggaccggcctgctcgaaaactgttcccaaaattctctggagaaaaagcgcacgattggcaaagccttcattcagtatgctggatagcagcatttctgcggagtcatgctggtggctaagcctgattgcctgttcgatggtaagctcctttaccaaaacgcctgccacgagatcgtagatctccccagggaccgcatcaaaagcggtatggtattccagcacggaaagatacccgatggtcagagagttggagatcagaggacatattcgcctccgatggggcccccagtcatcaaagatttgaaagggcagcggagttccccgcatactctccaccccatggagcatagccgcatattcaaaaagacagtatcctcgcttctttccggcagtccacacctcatcctgaacatcagtggtatcagaatatgataccgtgtagtagttcttgtcaaacactgcaatgggatttttcagcacctccgctgcccgatctaccagcagatccatattgttgtaatgaaatgaaaagctcagaaattcttggatcgtctcatagtcaattttgcacattttgcacagtttcacctttcctctgtagaatgggtttattctatgagtacaaatccagccatcaaattgataccattgtaacattgagtcccttttttcgcaatgctaaattatttacagaggatactaatttgagaggtcctaacaaaaccagccatcaaaaaatgacattaagagggagggattttttcaaatgcggacaattcgcatcggttctggcgcaggcttcagcaatgatcgggtagaacccggaattgaattgcttgagaagggacagctggactatttctgcttggagtgtctggcagaacggaccatagccattgcacaaaaggagaaaaatctagaccccaacattggttacaatccttatctcgcatatcgtatgaagaagatcctgcctatcgccgcggaaaaacatgtgaaagtcattaccaacatgggtggcgcaaatgttcagaaagctgttgaaaaaaccgcagagattgccagaagtgcaggaatctccggcctaaaaattgtaggtgtgctgggagatgacatttttgaccgtttggaccggtacgcggactaccccatttttgaaactggtgagcggcttggcgatttgaagaacaaagtggccgccaacgcctatctgggctgcgccggcatcgtgcaggctcttaaggacggtgcagatatcgtcatcacaggccgctgctccgatcccgcgctgtttctcgggccgctggtatacgagttcaactggcccatggataactatgatctgatgggcaaggggactgttgtgggacatcttctggagtgctccggacaggtcagcggcggtaacttctgcgtgcccggatataaggatgtagaagatctgtggcatctggggtttccctatgcggatgtcagtgaggacggcaccatcgagatctccaagttggaggggaccggcggacgcgtagacgtgcagacctgctcagagcaactgatttacgagatccacgatccctccagctactatacgccagactgtgtggcggacttctcccaagtcgcctttgaacaggtcggaaaggaccgtgttcgggtaacaggcgctaccggccgcccccggaccgacacgctgaaagtcagtgtgggatacaaagacgggtacatcgggagctgcggactgagcttcggaggccccaagtgttttgaacggatggtactggctgttcagaccatggagaagatcattgagacctactaccatcctgcagagcaccgggtggatattatcggctacaactccctgtatccccgggacctgtcggaggggttccccggcggagccgagccgctggagctgcggatgcgggttgccgtacgcgatgccgaaaaagagatgctcaccatgatcttcaatgaggtggatgcctttactattgacggccccgccaactgcggcggtatggaacgccatatcacggagctggtcgcggtgttgtctgtcctggtgcctcgtgaagatatcgagatctcttatgtggaggaggttttgtaagatgaagctgctggaaatcgcacactcccgaaccggcgataaaggcgatatctccaatatttctgtcatcgcctacgatatgaaggattacgagttcatcaaagaaaaagtcacggttgagctggtagccaaggtatttgccggatactgccgcgggacagtcacccggtatgagctacccaagatcggcgcgctgaatttcgtcctgaccaaaaccctgggtggcggtgtgacccgcagcctgcggctggatacccacgggaagtgcctttgctcctatttgctggatgtggaactggataacgtgtgaatggagggccagctatgaacaaaccaacctataccatcaaaccgctgtacctgggcgagatgaccaggtatgaaaaatccatgcacacattcacctttgactatggtgtcaagatgcactctccctatctggcctttttggtacagggtgatgggaagaacattctggtggacaccggccccaaaaatctggaggtcattaaaagatatcacagccatgtggaggcagacgtgcccccagaggttcacctgctcaaggtcttggaaaagcacggactgaaaccggaagatattgacttcatcatctgcacgcatctgcattgggaccactgccagaacaatgactgcttccccagcaaaaaagtctatacccagaagcgggaagtcctgtatgccatcaatcctgtggaactacactggtatacctacgagtctccgcagtgcggattgacacctgtctgggcttctgccggcacgaagctggttgtcctggacggcgatgaagagattattcccggcatcgaagtgttcttgactcccggacacactcccggttctcagtgcgtacgtgtcaacacagaggatggctattatctcattgccggcgacacagtcaatatttatgaaaactgggaaggcaatgccaaataccaccatgtgcctgcaggtatccatgtagacctgagagagtatgaagagaccttcaaaaagatggataagatcgatttcaaggtcatccttccaggtcatgatatgaaggtgctggagcacagcgtatatccctactgaggaggagaaccatatgcttacaacctacaagatttttcccatatatctgggggaaattccagtacatgataagtccagctttacttatatggtggatcccggcgtcaaaatgacttgtccattcatctcctttttgcttctgggcagcaacggtagaaaaatcctggtggacaccggcccctgcgatgccgaatggggtgccaagtatcatatgcccctaaatattccggacgggtgtgagatcgtggaggttctgaggagagactttgaccttgcgccgggggatttggactatatcatcaacacccatctccactgggaccacagctgcggcaaccacaagtttcctggcaaaaagatctatgtacaggcatcggaattggaatatgcactggatccactgcccatccaccgtgccacctacgaatctccgcaatacggtgtggtgtctagctggatgcgagctagggatcagctggtcaccgtggacggagatactgagattgatgacggcatccgcctgattttgctacccggtcattctgacggtatccagggtgtactggtctccacggagaacggcccgtatctgctggcaggcgactgcatcaacctgtatcagaactgggagggcaacggaaagctccggcacatcatcggcgggctgcattccgatgtaaaagcatatttcaagacctatgagaaaatagaggcgctggaacagacagaacatatcaagatcatccctggtcacgatgtacacgtactggatcacaaagtctatcctgtatccgtcgaggagggttctgaatgaatatcctgtttttattattggccattgcactgttcattgcgctggttctgaaaaatgttcccatcgtcatcgccacgatcctgtcctctatctttctcttgctgacacagcagatggacttgtatgatggaattaccgccacatacatgacaggctttggagactacgtaagagatttcttcctattatttatgctgggtgcactctttggaaagctggtggagatcagcggcgcggccaacagcatctctacatttatcttccgagcctttggagatcgctttgcaatcatcggcctgatcatcatgggcattatcttaacattgggcggggtcaacctgtttgtggccatgtttaccatgtaccccctggccatggctatgttccgcagggcagacatcccccgcaagttctttgctgccgcttattttgtgggctgtgtcggtgcgacgatgaccgcgcccttcacaccgtctatccagaacgcgacacccactgtctatcttggcaccacagtggccgccgccgctgttccgggcatgatctctactgtgttgaagctggtgttttgcactgcttatgtgatgtgggtcgtcaaacgggccaagaatcgcggggaacactttgaagagctggagggagaggctcccgccactgaggtgggtaaggaaagctctggcccctccgtgctggcatctgtgctgcccatgctggtgatcctgctggtgctgaatgtggccaagcagcccattgtcacctccttgctggctggtattgtggcagcatttgtgttctacttcaagcatatgccccacagcctgaaggagatcagcgccgaggtgcaggacagtgtgttctctgggctgaagacgatttccattactgccgccgcagcgggctacggtgctgtggtcgccgcgacaccggctttccaggaaattacagactttgtcctcaatctggacggcaatcccctgctgatcgccggcattgccaccatgctgatggcgggagttatgaactcctcctccggcagtatggccattgtctgtcccatcctgggtgagaggttcctggccatgggtgtcaacgccgaggcgctgcaccgggtgatcgtggttgcatccagcactctggattccactccgcaaagcggctttgtgtgcaatatcctcaaccacagccacaccactcatcgacagggctactggcacgtctgcgtggtgtccgtcattgcgcctattgttgaaacattgctgctgatccctctatgtgcaatgttcggcctggcataacaaaaaattgcggcctggaatatccaggccgcaacacatatcacaagaggtacaatatgataagaaaagaaatcattggtgtttacggaacgggtaccattggctccggtcaggctaccttgactacaggtaatgggtatgcagttgtggtagttggacactccgccagaggaatcagccgctgcaaacgcgcaattgagcataactgggatgatcttattgccgagggtctagcgtccgaagaaaataaggcggcagcaatgaatctgctgatcttttccgatgaattggaggcgctgaaggactgcacctttattctggaagcggtatcggaagacccggatgtcaagcgggaggtctatgctaagattgcctccatctgcaggccggatactatttttgcatcgtgtacgtcttccatggacgcggaccaactcgcagctgatattcccaatcccgaccgctttctgattgcccacccatttcagccggttcatctgcagccgctggtggaattggtgggatgcaaggcaacgagcccctctacgctgcggcgggccaaggcgttgatggactctctgcaccggcagacaataatcctcaaccacagcgttcccgggttcatagtcaatcggctggctcaggctctgtatagggaatgcattgacctcattgagcggggagttgcggaaccagccgatatcgacagagctgtacgttacgccgtgggtatgcggtatgcatccattggcctgctggaatatttcgatgccgtcggatatgaattggaggcagccatcgccggaaatatctatcccacattgtgcaatgcgagatctgtgcagcaacttgtggcagatggaattgctttcggaaaaactgggcaaaaagcccgacagggtctgtacatctggtcggagtctgatctggaagattttcgtgatcgcctgcaacgcccgtttttcacccaggtaagagaatgggagctcccaactggcacttctgaccagtaaatcgtacagtgtcatacgaagaccactatccggaaaacacccggagtcattgtgttgcaacggctctgggtatttttggaaatttggcaattttcctaaaaaatggccaaaacccacaaaatacctagggcccaacgacttcctgcttgatcgcttgataaccccatctctgtaggctattgacccaaatttggctaagcgtaccaaaaccgccgaaagcaatttgctttcggcggtttttacgttatagaagtttcatattttgcggtagggcgttggtacttctacagccctctattccgccggaggaaacctccacggctccgccacatactggtacagaaccgcaccgcagttccggcagatcacatacttcagccggttgcccaggagtccgttccgccggaaggtcacgatggcctcattttgctgccagccgatccccaggtcatacgatccgcaccaggcgcaatggttgacgggaatctgcggctgtttttcctctctgtagatcattatatctccaacccctcctgcagcacctgactggctgcctttttgttcttatcgaaagcgtgtgtatagatgtccagcgtggtggacggctgactgtggcccagcaggcccgctacggtggccacgtcggccccgccggcgatcagcagactggcgttggtgtggcgcagggagtggacattcagggcagagggcagaccatgcttcttcagaatcagcttgaaccgccaggtgaaagtggagggcgtcatggggagccgctctccatggcggcggaagatgtagtctgaagtctccaattccctcccatcatacgtctccgtttcccaggcacactcccgctggaactctttcagcagggactccatctccagtgagaagtacacgtatcggtccccggccacagtctttgtttccttgacgataatgtcctcgccggtgacctttaccacattccgctggatgtggatggaccgctcgtgccagttgatgtcaccccactgcaggccacagcactcgccacgacgcatcccggttgcgatgatgagtttgaagtaggtctcgtacttgagactctcttcctccagggcggagatgatcctttgcagggtttccagatctgcgatcttcttttccgttttcctccccgcatagcggtatgtccgccaggcggggttgtgattcagaaagccgccctccatggcatcggagaggatcgtacacagcgttgcgtgtacgccctccacggtatgctcggagagcggccttccagtttcaaggctgatgacctttcgcagatccgcatagaagttacggaagtgctcggggcggagttctgccaacttgtagtgccccagaatcggcaggaagcggtcaatgtcctgccggtcacgggccagggtggacttggccaacttgccgggggcgatctcccggagccacagctccgtgtacttcgccagtgtgatgctccgatccacttcctcctggggaagtgacctgcactcccgctcgaacaggaccgcctgctccttcaaccatttttcccgctgttttggggtcagaccctccggtggatgaacggttttctgcttgggcctgatgcgattgccctcgtagtcatagcccatagagaccaccagcaggtagctgctgccccgttttcggatacttgccatgttgtgttgacctctctttcgctggcctcactccagttgaggccggttttgcaaacacaacataccgcaagtggggaagtaaagctattgaaacttcctggaaagaacattttctacgaaagcaacaatcaggcgctgcgggatttggcgggacacgcggcggccagattgaacaggacttcgccctccgggcggagcatggcgcgcatggccccggcggcctgctctttctgctcctgctgcggatggcagtaggtgcgctccagaaagcccgtgtccgcgtgccctaccagatccgccactgtctgcttgtccacgccggagtggagcagggaggtcacatagtaatggcgaagcgtgtgcaggtgatattcctttggaaatccaatggactcatagattttccgcagccgtttggtgaaggtatccgggtgaatgagctgcccgagggcatccgtgaagagatagggaccaagttcccgatgcgccagccgggcttccagctgtttccgccggcggtagctcaaaaagattcctcggatatcagatgagagaacgatctcacggttgcggccgttcttagtagagccttccacgacaccttttccagggacaacgctgcgggagcggctgatggtcaggagcagaccgcctctgctgaacttgaaatcctcccacttgagggcgcacagctccccccggcggcagccggtacacatggagagcagatagaacatccggtagtgccgaggctcctttgccagagcatccagcagtttctgaatctccacgggggagggaatgtactgtgtagtgcggcgtgttagaggcagatcgatcatccgggccgggttcttctggatgatctcattccgcttggcgtcgctaaggacagcggagaccacagtcaggtatttctgcaccgtggcctccccaatgggcttgccacggtatttccgcttccgcagttctaccagcatattctccagagcaatcggccgtagccggttcaactggatggccccgataaagggatacacccttccaagcatccgccgatagctctccaacgtgctgggggcataccggacctgccgggctagccaccgttcggcgtactcctgaaagggcagattcccgtcctcgctgtaaccagatttgaactgccgttacagttcttccgcctcgtgagccacatactgccggatatcgcgcttgggaatgctctccggcacccggatagtcttggccctgcagatgtagataatcttctctcggattcggaactcacgttccatgatctctttcgtgtatttcaattcgtggagccggtcgtcccggcacttcatgccctggggtgtggtgtaggtaatggacttccgagtggccgaccatcgaacttgatacccctcgctctccatcagggagatgaagtcttccctggtagatgcgaaccgcatacattggtcgatggcattcatgagtcggaatttccagctctcgcccttggcggcagagcgatactcccgggtgtccatccacttctgctggacctgcttctgcggaggtggaaggatcgacagatggtgggcggcgcagatctcatcgttggccagccgatgggcctgcaggtcggcggcactctggtggagcttgcggccgttctggaagctgacactgtttacgatcaggtggctgtacagaatgtcggtgtcgatgtgagtcgccaccagcacctcgaagtctggaaacttccgctgggccaactccaagccaatagcatgtgcctcctggggcgtcaggccatccgttgccgcaaagaattggacgaagtggtagtactgccagccatctgttttaacgaaccgctccttggtgagctgtatctcctgccacgccgtcggggcagtacagttccagcctgacaccagccgatgtccttcccacagcgttttttcgtcctgtcggatgtactgaagcactccggcgagcgcgccccggccaccgccccggttcttgatggtggtgaaggtagccatctcagttcacctcccgcagcagatggcagagctgcccacagatcgcttcgtacttgtccgctaaggcgtcgccgcgcagaatcgtgaccttgcccatgttggccagggtggtgagctggttcaggttccgcccctgagccttcagctcggagagcaccttgtccagcccctccacctgcacgatctccttacccaggccgcagaggcacaggcaatcggtgacggttttgtttacgcttttcgcacgcgcctggatgacggcctttgtccgggggcgtcactcggagcgtgatgatttccgttttcttttctctcggcattcgtactcctttcaaactttcgccccaaccaaacgaaagtccagcgaagcgggtttcgtttggagaggagacacagcggaatgaatgcgccctgccgctcgcggcggggcaaatgatatggagcttgtgtcgacgaaggggctgggggcggggcagggccccgaaactgcggccggtgtatagccccggacgcgatgcttgccctcccatatgggaggtttttccctgccggagctgtgaacaccacacccagcaaattattcatatgggtcgatggtgacgatcttttcggtagcgagatcatcgacaccatcgacacttttcaggcagatgagtctgcctctgctccacctgcgaaatgacacgacgatgccactgttccttagagccccaatgtttttccaaatttgatgggagaggctgttgcgtgttagcccttcgaggtcggcaggatcaatcttttccagcagcgccttggcagagacacagatctccgattgttcccatagcaaggcggagagaagaaagacaatccgactattggacggttccgcttccgctcagttgtccctgagcagattccagatgtgacttttaccatcgaactccaggaatagctcccggtagatgatgtcccggccggtacagtagagggtggcggcgttctctccccgcctgcgcttgcggagcacgaagttggagcctgtggcgccactcaagcctgtgatgccggagatcatgtccatagggtcgtcatcattcagcttccgcaggtgatggatcaacaagacggcaatgtagtgccggtctgccagatctttgaggacaccgatgtcctggtagtagggatttgttttgttcccagccgcgcgaatgcgctggagggtatcgatgactaccagaccaatagccggatgcactttgagaaactacgcgatctgttccaccagtccgctgtggagctgctccgccatcatggcgaagtgcagcgacggaggcgtgagatcaaagagcaagctctggatacgctggaagctgtcttccaggtagaggtagagacttcgcacgggtatatagcgaagctccagagcgatttgccctgtgcggcacagagacatatctacagggccagccgggacttgccgatcttcggtgctcctgccagcaggtggagcccctggggcagcaggtctcctccacgacgaaccagaggggcatggggaatgatctgctgggtatctgcattaatggtattcaattttttcatccgaaaatctccctttccccaaaataaaggcgcggatcgacggccatcgatccacgccctctacaccagagaaaatgtcttgagtctgaacaaccctgggaatatccccctgggagaattgatagcagaggcactgaacatctctccggaggagtaccatgagctgcagcagatgctggatagggcaatgacagcatggaccgctatgaggaagatcactggatacgggattggttcgatgccaacgaggagatgatcctgctccatgacgccctgtgctgccgccagatatttcgactgatccaagagaaggatgagatcctatcagaagcgagaacattcccggagcagaattctcttttcccagaagaagatctggaactcggagaacgggacagagagggcctggccgcaatcggagcatataaagactacttggagtacccagaggactatggtggggaagatcacatcgtctatcaatttggcgatgagtattatacttcgtctgttcctcgaacgccgataccgccggagtcaccggaaaagacgagggcgctgttggttgcctatgggcagctgaacgtgaagtgggccgcctataaaaaatattatatataactacaaaagactcctggaagacatcgcgtcggtctgtcagacacttcgggcgttcgttcgtatgggattctcgtcgctggaaaagctgacgcccaataactatgtggcatcactgcatgaatttttgtttcatgagcgagcccataagtgggttacaaatcccgcggaagggaccggattttacacctacatggatgacgtgcggattcatcttcgcctccaggaaacggctcctggctccggcgcattcaaagtctacgagtactagttggcagacctcctccagaccatgatgaagctggatttctataaggcactggaggccgggcacctaatccgcaggtgtgagaacggtggacggtattttctgctgtaaaaaggttaccacatcagatattgcgacctgcccaactccaccaaccccaagtacacctgcgcccagctgggctaccggatcagaggcgtcaaggaggaggcggaggacagttcgctgtcccaggatctttaccactgctatcagcggatcgacaagggttggtcccgaggtgccattacagcggaggagcgaaagctgctgcgagagaaagcacaagagatttaccgcgtagcaagaacaaaaccgagtatgttctatgaggcatttaacacatctctgtctaataagaaactgtatccgctctgtgccgttcagtgaaaaagcagatccagaggaagaaaaagaacgttgatctttcatcttggaaggaagtgggcggtggcctgtgacaaacgaggaactgtatcagaaatgtcggatcggtgactccaccgcctttgaatagctccacagacagatggaaaacttcatccgaagaattgctctggatgcggctaggcattttgaatgtacagacactgcagcgacattgctgatagaagctctatgtgccgaaggaaacctggagttgtgggattggattcaggtcggcagccatgatgagcatgcgggaaattaaccacctatctcaaccccttttgcggggaagaatgtactgctatctgaagactaatttgggcgtcatagctttgagcaaggatgagatggaacgtgtacgactaccccagaaactctgccatgcggagggaaaggccatcggcgagatcgcgacactgttatatatctccgggatgtcagccgcaagactggtcggataccatatccatttcctatctgtatttgatttgtagagggaaggcgaggagggtgatccatttgagtaactagaggagcatgagcaaggaacgtctgtggagcagatcgtctaccaaaaggtgcacctggaactgctggagctactgctctgcttgctaagcgtcaaaaaccgctctattctgggccacaccttcgggggtatacggctatgaacagctatctgctgatgaaaactgggcctgcaggagatgctctcctccgataacatgacaaaggcgagaaagacagtcttggggcacctgcgccaacgctgtcccggaagtgatctccaccgctggcgcagggccttccggctgatgaggaatgcgagggcaggagattccactgcctgtctatcctatccggtgtggtgggggaaataatccatccgtgaagatgattcggaaaccttcttgccgactcccacagccgtccgcatcggtcttgggattgaagttactgttgccgtcgtagacacacaggtagggatactgacaataagggagaggtggagccacgcggctccgcatccttttatatttagctttttttgttaagcaccatctgattttgttgtagatcggccatccggagaagcagggcatgacgttccatgggctggccatctggatgaactacaacggccccagtggagtggaaagggcattcaagcgtgttatcccaaaactgaaacaacacgtccacggcggagtgtggccggacatccagagacctctccagaaggcacagcaggagttctgttactgcacgccacaagagacatggatcaaataacagtggaatctcgatataagagtcaaggtctagttgttttgcacggaagtcaatcctagagactgccttggtacatttgtggaaaaactttgagccgagcaggcattggcagagagacgttggcgccattggtattgtgtattatataggacggttgcgctctgctccatgtaatttgtccggtgttttatggctgtgggacaggtgcttcatcatcttcaggcgatcctatttttttgcgggggtgtaaacaagaactctacatggttatcagaataggcagcataggtgtggtcctgcttggggagcccttgcagcattgtcatttattgtaaacaatggattgtaaaatttgtgcgttgatgttaaaatataactaacacattggtgagaacaatacactttttgttcaaatatgcagcggctggcgatatttctttgcggtcagtagatgaatcaagtgttttgctgtggagcaccaaagtgaaactacaggccaatttggcatgggattatcagaaaggagagaaaacggaatggagtccatgaatgaggagaaagaactgttggaacacgtgatgaagctgatggcagagcatttcgggaaaaattgcgagatcgtgcttcatgattttatggcgcctgacaaccatacaatcatcggaattgaaaatggggaggtaacgggccgggagattggcggatgcgttacgaatctgggcttggagatcctcaacggaaaaccggcggaggatgcattcaattatgccacctatgctgaaaatgggcatcttctgcggtcttcctccatctattttcacaacagcgctggacagcccatcggttccctgtgcatcaacacggatattacggataccacgtattttgaaaagatgctgcgggaatacaacaatacccacgactatgaaaacagggaagatgcttctccgaaggaggtcttcatgccggacgtccatgagctgctgaatcgcctgatcgaccagtgcatccaaaaatatggaaagcctccgaagctcctgaccaaagaggaaaaaattcagtttatcgcggatctggatatgaagggggcctttgtgatcacgaaggccagcgatcgcgtctactcgctgcttgggatttcccgatacacattctatacatatctggagcaggggaggaaaatgcgtggggaaagccggactcctgtagaataaaatgtttgtctaaaagacacattttttgtcttgacatagaacggattattgtgttaaaatacaatcaaacttaaaacgcagaaataagaacaacggtagagacgaatccgatcatgttttcctctcaaaattgagagtttatttctgcgaatttttttaccctttgacaaaacagaatgtctgtataaaaaacataaagtatgtctgctatcagaggccaacttctgaagcatataaaaactgacagggggaaaaacgatgaaaaaatggtttgctctcgctcttgcggcaatgatgatgctcgcaacactgactggatgcggcggtaccgaaagcggaggcacccagcagacccaggaaacagaccagggtcaaagctcctctgagaccgacaccgtagtttacccggagattcctgcgaagaccggcagtctgaccattggtatttcgacaaacgcgctctccaatatccacaaccggcatatgtttgagggactgagagaagaggcggaggggcgcggccatactgtcgtcacggcaaacgccaatggtgaccccacgcaacaggccaacgacattgaaaatctggtgcaggccggatgcgatgtcatcgtcgttcagaacgcggacaacttctctctgaagaatgcggttcaggaggccagaatggcaggcatccgcgtgatctgcgaagacaccggctggattgacggcatcgacgccatgttcctgctgaacagcattgctgtccaggcagacattaacatgatcctggcggctgaggtgggcttcagcggcaagatcatcacaacggggcatcaggacaactttgctttgagggctggctcctacatccatgacgcatttgtagaagaatatggatttgatgttgtagctcatgtacagacaaccttccctggtacgaccgaagtgacttataacggcgtagactctgcgctgacagccaaccccgatgtggttgcgatcttcacatctcaggatctggaggccatgggtgcgatccaggctttgaaggagcacgatctctatcctcaggtaaagtgcataggcgttgacggcgaggtagacatcctcaatgatatcaaggccgacggctcctgcattgccacggtggtgtccgatctggacagcgccaatgtcaatgtcgtagatgcctgtgaggcgttgatggccggcgaggatgtggcgaagtaccacgaaatcccgtacgccgtcgtcacaaaagaaaatgtggatgagttcctggagaaggctactgctgaggctgagaagtacgcggaataaggctgatatagagaacattgggccgccctgcgctccggaatggggcggcccgatgccatctatgaaatatttttagaaaatgaaggggaactgaccaatgagcgtgtatgagaatttgaaagaacatgggatcgagctgcccaagcagctggctgcggccggactctataagcctgtgaatcaggccgggaatctggtgttcatctccggccagggcagcatggtggatgatacgaagatcaccggccgtgtgggcgctgacctgagcgtggaagagggcgccgcagctgcgcggatctgcgcgatcaacacactggccgcgctggaggcctatctgggggatctgaacagggtgaagcggtgcgtgaaaatcctgggtttcgtggccagcacagatgatttccatgagcaggcgcaggtcatcaacagcgcgtctcaggtctttatagacgcctttggagaagaggggcggcacgccagatccgccatcggctccaacgccctgccgctgggcttggccgtggaagtggaatccatctttgagatcgaggaggcctgaacaatgctgggaagggatgttagccctgtagagatcgcggacattttcgcggcagaacagagactccggaaagtctttccgccctctccgctgctgaacatggaattcctgaaccagcagctgggtgcgcaagtctggttgaaagcggagaaccttctgccgtcgggggcctataaataccgcggcgccatgaacaagatcacttctctgatcgagcggtacggcaaggagcttcggatcgtcacagcttcctccggaaatcatggcatggcttgcgcactggccgcccggaatctgggggtccaagcaaatgtcgtggttcccgtgtccacgccccagatcaaaaaggacagcatccgcgcactgggggccaatttggtggaagtcggcgcgacatatgacgagtccttcgtctctgcctgtgaactggcagaaaaagagcatctgtactacgtgcaccccacctctgaccggtatactgtgggcggccaggggaccatttccctggagattctggaccagtgcccccaagtagagcagatcgtggtgcccatcgggggcggcggcctcatcacggggatcgctctgaccatgaagacgctgaagccctccgtcaagatctatggtgtgatgccggcagggtcggctgtctatgtggaatcccgtcggcagggccagctggtgacgctggatcactgttcctctatggcggatgcagttgtacggaaaaccggcgaggaatacctgtatccttacattgaaaaatatgtggatgacatctttacagtcacggaggacagcatccggcaggcggtcagaacagcgtgcttgtatggaaagctgacgctggagggctccggtgccctggccttggcggcgttgctggagaaaaagtgtccgctcagtcccggaacggttctgatctgctccggtggaaatatcgacaaagctgttttggacctgtgtatgcaggcttgagaggaaatgatggctatgatgaccgtgaatggccagcggctccaagcacatcttgaggccctggcggatattgcccgaaccccggacgggatttgccgactctcctattctgacagcttttggaagtccaacgcctatgtggcgcagctgatgcgggaggctggcatgagcgtcaccaccaatccagttggaaatgtggtgggcacttatcctggcaggtctccgacaaagattaccataggctctcacatcgattctgtagtaaatggcgggatctttgacggctgcctgggcgttctcgcggggatcgaagcggtccacaccttatctgaaaaggggatcgtccccgaacacagcatcgacgtggtgtcctttgccgaggaggagggcattgtgatcaccggactgatcggcagccgtgcttactgtgggttgccacccacagagccggtgctagagaagatgggggagttcggatttacccttcaggacttggcagaggcgaaatacacgggagacatcgattactcccttgagctgcatattgagcagggcggtgtgctggagtcccagaagaaggatatcggcgtggtccgctcgatcattgccctccggcgctatatcgtggagtttgcgggcgtggccaatcacgccggcacgacgcccatgacgctgcggaatgacgcgttggtcaaggcggccaggttcatcatgcgggtccgccaggtggtcatggagaccgacccccacatggtgggtacggtagggcatctggaggtgcagcccaacgccatgaacgtggttccgggccgtgtggctttgacgctggagctacggggactgcgggaggatctgctggagtccgtttatcagatgctgatggaggagttccggaaggacatcgtctcctgccggctgacgatggaacagccctgcttccatatgtcggaaaccgtgcagcagagcgtccggaacgcggcccagaagctgggacttgcggcgatgactatggacagcggagccggtcacgacagcatgagcctctcgcaggtgacgagggtcggcatgatttttgtcccaagcgtcaagggaatcagccacagcaaagaggagttcacgacgtgggacgatgtgaccaatggagcaaatgtcctcttgcacgccctgtgtgacatcgatcgccttgaaacacccgggaggtgaattttttgagcgagaaaaacgactatatcattgagatgcacggcatccagaagagctttggcggcgtcaaggcgctgcgtaacattgatctgcaggtgaagcgcggaagctgccacgcccttctgggcgagaacggcgctggcaaatcgaccttgatgaaggtcctgaccggtatcattgcaaaagacagcggaaagatcctgctcaatggggaggaggtccagatccagagcctccgccatgcagaggagctgggcatcgccatcgttccgcaggagctgtcctttatcagctattttacggtggcggaaaacatcttctatggcgaagagcctacacgtcctctgcctctgctgatcgactggaaaaagctgtataccgcctgtgatgagaagctcaaagagctgaaaatcgatctgcccagcaaaatgcaggccggaaagctgaatgtctccgatcaacagatgatggtcatcgctcgcgtactggcaaagaatgccaacatcattatcatggatgaaccgacggcgcgccttggtcatggagaagtgacgaagctgctgaaatatattcaatatctgaaaacctgcgggaagaccattatttacatctcccatcgtctggaggaaattttcgagatctgcgataccatcacagtcctgcgcgacggcgagacgattcagaccgctcccacctcccagatggacagcgacaagctgatcaacctgatggtcaaccggcagatcaaagtcaacaccacccggacccggaagagcagcatcggcgagaccgtcctctctgtaaagggactttcgaaaaagggtgtgctgcgggacgtctcgtttgaagtccacaagggtgagattttggggatgttcggcctggtgggcgccggtcggacagaagcggtccgcgccatgctgggggttgaccggtatgacacggcggaaatccggttggacagtaagcccgtcgtattcaaaaacatcggacaggccctagccgctggcgtcgcgcttgtgccggaggagcggcggaagcaggggatccttcccaacacgccgatttacaagaatgtgtccatctgcaatctgaaggcgctgtcgcgtctgggcctgatcgacaagaagaaggaactggaatacgccaagcactgcacggagatactgggcgtcgcctgctcctccgtattccagaatgtgggaaatctcagtggcggtaatcagcagaaggtagtcatttccaagtatattgaccgcaatatccgcgtgctgatcctcgacgaacccacccgcggcattgatgtcggtgcgaaagatcagatttatgaaatcattgagggcctggcacagcagggaatggcagtgatcgtgatctcttctgagataccggagttgcagctgatgtgcgaccgcatctgcgtcatgagccaggggaaagtgacgaccgtgatcgatcgttctgaatttgcggattccgataatattctgcggaatgcaatcggaatatgaggatagggaggagttcattgatgaacgccaaattaaatgtttccagaattgcccggaattacgggacgcttttcgcttatatcatcatgctgctggtgttctcgatcctggcgccgagtgctttcccgacgctttccaacgtgatcagcatcctgcggcagatcgccatgctggccaccatcagcctgggcctgaccttcgtcctgatcaccaagcgctcggatctgtccatcggctacagcacaagcttcctcgggatcgtagtggctgcgctcctggtcagggctggaatgaacatatggcttgctgcattgatcacggtccttctcggcgcactgattggactgatcaacggcgttgtgatcgcctatctaggagttccggactttattgcatctttgggagtcggttacgtggtggctggcatcaatcaggcctataccaaaggccaccccatctccaatctcccggcggactttgagatctttggcgctcagcgactgggcggtgtgatcccgaacgcggttatcatcatgctgattgtactggtcgtgtctagcattatcctcaaccagacaaagttgggacgatacatatatggcgtgggtgataacgaagaggcatctctgatgtccggcgtcaatacgcgctccaccattgtgtgggcctatgttttctgcggcattgcctgcggcgtcacggccgtgatgctgacttccagactgggctctgcgcatcctcaggctgcggaggattacttgctggatgctattgcggccgtatggctgggcggcaccgctttcaaagacggtgagccgaatctggctggtacactgctgggcgctctgattatcggaacaatggccaacggcctcacgatcctcaatgtctcctactactatcaggatattgcgactggcctgattattctcgccgccgttattatcacctcggttcagaagagccacaagaattaacgaaggattggagaatacttgtatgagaacactggtaaaaaacgggaccattgtcacagcagagagtgagtacaaagcagatattctcattgtcgatgaaaagatcacgtcaatcggcaccaatctagaaggcccctttgatagaatcctggatgcagagggcaaatatgtgctccccggcggtgtggacaaccacgcccactttgaggcgctcaatacggacggcatcaccacaaacgagccctatgccactacctgggtggccctgcagggaggaacgactaccattgtggacttctgcaccaatgaacccggcatgaacctggtggattccgtcaactaccgcctgaatgtccgcgccaaaggcaaggtggctcccgacatcgccattcacgcctgctgcaacgatttcacggatgagaccgtcggtgagatcaaaaagctggtggagatgggtgttcccaccatgaaactgttcctggcctataagggcacctccctctacatggatgacagcaagctgctggcctgcctggaggaggctggcaagcagggcatgacgatgatggtccatgcggagaatccggacgttctggataagtgccgcaatgatgcggccgctaccggacactatgagccaaaataccactacatgacccgccccccctacggcgaggcggaagccgtctcccgtgccatccggtttgcggatgccatgcactgtcccatgtgcattgtccatgtcagctgcatcgaggctggcgaggagatccgcaaggctcgtgcggagggcaaggcggtgatcggcgagacctgtccccactatctggtgctggacaagcacaagatggaccatccggactggcacatcgccgcccggtggatctgctctccggccctgcgggacaaggaggaccaggattacctatggaaggcgctgaataaggattggctgtccatctgcggctctgacaattccggcatcccccaggcacagaagaactggggctgggacgaggagcatcagcgctgcgacttccggatggtccctaacggttgccccggcgccggcgaccgcatgaatgccctgtggacctatggcgttgccgccggccgcatgacacggcagaagtttgtggatgtgtgctgcaccacgccggccaagctgaacggcatctatccccgcaaggggaccatccaggtgggcgctgacgcggacctggtgctgttcgacccggactacaaggggacgatcacgctggagaccaaccccactggcgtggagtacaacgtgttcgagggcctggagcaaatcggccgcgctgatacggtgttgctgcgcggcagcgtcgtggtggaaaacggcaggtatctgggtgaagttacagaagttgtggctgacggcattacctatcagggatgcaccagcgccaacggcaagtttattcccggcaaaccctatggtttgggatatgacctcttgaaaagatcataagaagaggattgcaatcgggatgaactccttgaactttcacggatgtataagagacgatgttgatcaatttcctatcaatgctgtaacagggcgccgagtacatactcggcgccttctgtcatcatccagtttgcatatgcgaactacctttattacatagggaacgttgtaagtgtaaaacgattataagaatatgaggctatcccgccgaaaggccgatcttaacttatatcgtctgtatctcagaaaatatttcctgttggcttgacaaagagggcgtgcccattttgaagaaattgacgaaaccattatctgcttagtacgatgactggaatgttaatatcatcaatctgctggagacctacgaccgtctgattgcgtttggtcaaaagaacctcagcaccccctttgtgcaggagggcatccagagcatcagcaccagaaatcgcatcctgcgtgagctctgctcccaaaacccgcccatctccaaagtgttccgggagattgggctggcggacgaacagggatccgggatggggaatacttataagtacacaaagctctactccggcgggagcccggaatttattgagggtgacgtgttccacacagtcatgccgcttgctccaattacggctgaaatggttggaccgcaggacgtcacccatgtgaccctacatgataccctgcttgagcgtatccttgttttttgaacggaactgcgctctaaagcgaggattatgcaacactgtggttttcaggatttcaaacatttcacgcagaagtatcttaaacttttgctgaaccttgggatgctgaagatgacccttcccgataaacctcagagccacagccagaaatatatgacggtgcaaggggctgtacctaaaaattgaacacaatttggaataaagaattgaaggcatgatcttgggtaataaaagactatattgtggcgaaaagctttgataagttaggctgccttgcatacctctgtaagacgtctaatgaggcttggtacctttcaggtatactagaggttctgcaggctgtcggcgtccagatcgtgatcctggatggtcctgagatttattcggagtgtgtccctacacgtatgtggaggacatggagaatatcattgatcggggggacagttggacaggggtttataatgcagaagattacccggagatactgaggaagaattccatgccgcttacgataaagaggtccagaatgagcccgtcgggaagattaggccttgtttgaaaaataaaagttacacaagaaaccaagttatgcgaagctatgagcatgaaacgatatgaattaacaaaagaacaatgggaacggatcaagtcgctgctgccaccagaagaaatgggaaagcgggggcgcccccggaaggataacccgattatgctcaacggaatgctctggatcgtccggagcggtgcgcagtggcgtgaactgccggagacttatggcccttggcagtctatatacgcccaattcgctaaatggggggatgacggcactctggaagtggtattccacacactgtctacggacgcggatatggagaacctgaacatggactccacctgcgtaagggtgcatgaaagcgcaaatggcgaggaaaaaacggcagataaggcggttggccgtaccaaaagcggatggaacacaagactccacgctgttgtagacggtctgggaaacccgctggagttccggatctccgctggaaatggccacgattcggttcacgctgttgaactgccgcaaaaggtcagaatcggcaggagtgccgtgccgccagaccgggcctatggtgcccggacgattcgggaatatatctcagcgcacagggccagctatgtgatcccgccgcaaagcaatgtttccgatccctggccggttgactggcatctgtataaagagcgccatctggtgaagtgtttttcccagaaaatcaagtggtttcgcagaatcgccacccgatatgacaagccggatgcttccctcttggcctttgtgtattttgccgccatcgctattttgttactttagcacaatctccgccttttttcgaataagccctagtaagcgaccccatcctttttacggataaccggttgggaaatggagaagcaaggatactgccgatatccggtgatttgcgcgtgagggaagaatatccgggcagaaagccgttgccgggtgaaagcgcctaacctgttgggcacacactgctgttaccgtcatcctcacaaccgtttctgaaaattgcccgccacggaaacatcctcatccatgataataaaggaattgggatcttcttcccgcaggattttccgcaggtggagcgcctccttcttagaaactactgtcagcagcaagtcggacggctcgttgctgtaagctccgacgccagtccacttcgtcacgccgcggccggcatatcggaacaccaactgctccatggcctcagatttggtgatgatcagcatggtgaccattacattctgcaagtgcatccggtccagagtcaggtaggtggtgcagccgaagatgatgctgtaaaccaccacgtcctgttcaaacaggaggaggccgatcccgtatacgaacacattcaggatcatggcgattcgccccacgctgaaatccggctttttctggacgcacagcaaccccaggatctcctcgccgccgccggagcatcccgctgtcagcgtcatgcccgccccgacgccgcataccagcccgccgatgacgcaggccgcgattgtctcgtcaaacaatccttccgccgggatcgggattagggccaaaaaggcactgtaacagacgatgcaaagggcggtctttgcaaagaaaaagtgcccgaaccggaaccaggaaatcagcagtagaggaatattcagcagaaaataaagaatgcccgccaagtcgccgatctgctggatggcagggaagaaatgcagcagcagcattcgcagcagctgcgcgattcccaggaatcccccgctgtacatatcatgcggcagaatgatccagttcatggaggcggaaaacagcagggaacccaggatgatttgagcggcttcctgcaccggatgtcccttgtacagctccagtgccgtggggctgtcatgcgtttgctccatttctcatctctccttttcgctctgtggagaagccctggcacaatctgtgccagggcttctccacaacttgatcttactcagtcgccaggccgtgttccaccaggaactggtgggccacctcctgggcgctcatgccgtccacgtccacttgggcgttcatggcagccatggtcgcctcgtcgatggcaccgtccagtctggacagtatctcggccagttcggggtcggactccaggagctcggcatccacaaagttcacagcgtagtaaggcgggaagaagctcagatcgtcctccagcatggtgaggcccagcttggacagcagagcatcggtggcaaaggcgtccaccacgtccacctcgtcgttctcaatggcggtatagcgcaggctggcgtccaggcccttcacgtcctggaaagcggtgccgtacttgctctccagcaggggcaggcagtcctcgcggtccataaactccaccgtgcagccgagacgcagctccggggacttctcaatcaggtcagacagagaggtcaggccatatttctccgcagtctcgggcttgacgctcatcacataggtgttgttatagcccagggggttggaggtctggatcccgtgctcctccagcatcagatcgtggacggtctgccacacccggtccttatcggtgtccataggctgggccagcaggttcagcagcgccgttccagtatactccacaaacatatcgatgctgccctgctccagggcgtcaaagcacatggccgcgccggacaggccgaaacgctgttccacctcataatcggtatttgcctcgatcagctccgtgtagatctcacccagaatgttgacctcggtgaagttggaggtgcccactacgatggtcttctgatcgccgctgccagcttcagacccgctgccgcccgcatcagagggggtcccgccgcaggcggccagagagagggccatggcggcggccatcgccatacaggtgaatcgtttcaagtgtttcatacaaatagactccttttcagaatggggtgttgatatggttgagatatcgaatctgcctcacagaggactcatgcgatgatagaggcgtaggatgccacagaaaccaccagcagggctccgcacagcgcggcggccatcgccttccggcgggaccggaccgacaggctcaggtttttgatctggtcctgaggcagcagtccctcgctggtgaaggcccgctccacgcggcccaggaggaaatccagagtcagtgccatcagcgcggcggccacggctcccatgatcgtcatggggtaattcagggagttcatgcccagctggatgaaggagcccaggccgttggcaccggcgaaggcggcgatggtcatggtgcccacagagctcaccgcggcgatgcggatgccggacatgatgtacggcatggccatgggcagctccacccggcgcagctgctgcatccgggtcaggccgatgccccgggccacttccatggaaacgggggaaatgccggagatgccggtatatgtatttttcaaaatgggaaggaacgcatagacgaataccatgaaaatggccagcgtctcacccacgcccagaaagggaatgcccatggcgagcagcgccatacaggggatggactgcatcacgttggcgattccgatcaccacattggataccgctttgttccgggtgatgaagatgccgaggggaacggcgatgatcagggccagcaccacggagaagctggtcatggccaggtgccggagaaactcctccagcagactgtcccactcctccacataaatggagaaataatccatcaaagtgtagcgggacatatcactccgctcctttctccggcggtatgttccggaacgaactgcttgctcatggtggccagaatgatgctcttcgtcaaatagccgagcagcttccggtcatgctggatcacgggaataatgccggacacatcgtaatcaatggtggcgatgatctctttcagggaagtttccccctccacggcgatgtaatcatcggatatgtagtattctatggggtcggcctcccgctttccgatcagctcctccagccagacgacacccaggagcgtctgccccttatccagcaccagcaggctgtccacgctgttgtgcctcatgatctgcagggcctggatgacggtgcgcccctttgaaatagtgaagggacggcggcgcatgatgtccgctgcgcggatatattccgggttggcccacagccggttggcgccgatgaactctgtgacgtactggttcgcagggtgctttagaatgttttccggggtgtcacactgggcgacttttccatcctgaatgatgcagatgcggtcggccagcttgatggcttcgtccatgtcgtgcgtgacgaagaccaccgttttttgcgccttggtctgcagatcatggatttcgttctgcagctccgcccgggtcatgggatccagggcggagaaaggttcatccatcaggacgatgggcggattggcggcaaaagcccgggcgatgcccacccgctgctgctgaccgccggagagctgggatgggtactggccccggtagatttccgggtccagattgaccatcttcagcatcttatcgacccggtcccggatggcctctttggaaaaacgggcgatctgcatggtgagggcgatgttttcttccaccgtcaggtgggggaacaggccgcccgactgtaccacatatccaacctttttgggaaggtcctggaccttgatctgttctacgggaatgccgtcgatggaaagcgagcctccccgcaggggaagcagcttgttgatgctcttcagcagggtggtcttgccgcatccgctggaaccgatcaaaacgaaaaattcgcggtcatggattgtcagcgaaacaccgtccaacacaggcttatctttgtaggcgatgcgaacgtcttcaaattcgatcatgtctcctccatcttcacatcgtaattgaatcgagcgctggtttgcccatattatgggctgtgatttattaaaatgggattaagttctgctcagcgggcattaagattccatttcattgcgtgtgaggtgggggcggagcttctgaatgggctccagaaaggaaatgcgaaagctgggatatacgccgcctacacgcctcttaatccaatcttaatgctgtgggcgaaatacttatataattatggtatcctgcatgataggataaggctgttgaattccgatccagaatcatgggagatgaagatatatggaaaaaacagagaacagcactccctattccccccggtacggagaggcggagaccggaggcaccggaagactgaagatctttttcgggtacgcggcaggcgtgggcaagacctacgctatgctggaggcagcccatcaggcgcagaaagaaggcgtcgacgtggtggtcggctatgtggagccccacgccaggccggatacactggcgctgctggaagggctggaggtcctctcatgcagggaggtggactaccgggggatccggctgcgggagtttgacctggacggagccctggcgcgcagaccacagttgatcctggtggatgaactggctcacagcaacgccccgggctgccgccacaccaagcggtatcaggatgtggaggagctgctgcaggcggggatcaatgtctataccacagtaaacgtgcagcacctggaatctctgaacgatcttgtcacctccatcacagggatcgtggtgaacgaacggatcccggatcacgtgtttgaccgcgccaaccaggtggaactggtggacattgcgcccgctgacctggaaaagcggctggaggaggggaagatttaccggcagcgccaggcgaagcaggcgctggagaatttttttaccgccgagaatctgacggccctgcgggagatcgccatgcgccggacagcggaccagctcaaccgcacggcggtccaggagaaaaaggggaaggccgcgcgggcgggagaccatattctgatctgcctgtcctcagccccctccaacgccaaggtgatccgcacggccgcccggatggccgaggcgttccacagcggcttcacggcgctctttgtccagacaccggagaccaaggagctgtccggagagaatatcaaacgcctgcggagcaacctgcgcctggcggaacagctgggcgcacagatcgccaccgtctatggcgcggacccggcggaacagatcgcggagtacgcccgggtcagcggtatcacgaaaatcgtcatggggcgcgtgaatcaccggcagcacccctggatcgggcagaaaagtctggccgaccggttgatcgagcggacggacctggatgtgtatatcattccggaccgccagccgctctataaaaagccccttggaaagctccggaagtccagagtccgcttttcctggagagacgccgtggtcacgctgctgtgcctggcgatctccacagcggtggggtttgcctttgattgggcgggcttcagcgaatccaacatcatcacgatctacattctgggcgtattggtgacagcagtcagcaccagcgggcatctgtatggagcagccaactccctgctgagcgtgctggcgttcaacttcttttttaccgagccgcgcttcaccctccaggctgacgggcccagctatcccgtcacgttcctgattatgctctcatccagcatcatcgccagctctctggccagccgcgtgaaggagcaggcccgcatggcggcggaaaagagctactatacggagctgctgctgggaagcagccaaaagctgcagaccatccggacggagtgggactgtctgcgcctgacggcggagcagctcagccgcatgtttgaccggccggtcatttatgccctgaacgacgccgacaaggagctggacttccggatcgagccggcggacgaacacacgcttctggaaaagctgagcacggaagagatcggcgtcgccaaatgggtgcagaaaaacaacaagcacgccggcgccaccacgaatacgcttccggactcaaaatggctgtttctttccgtgcggggcacccgcggcgtgatggggatcgtaggagttcccattgctggttatgtggtcccggacgcttttgaaaaaaacctgatggtggcactcctgggagagtgcggcctcagccaggagcgtattcgtctggaggaggagcggaaccagatcgcgctccagacccagcgggagagcctccaggccaatctgctccgggcggtctcacacgatctgcgcacaccgctcaccaatatcaacggcagtgtgggcatcctgatggggaaggatcagacgctcaagccggaagtgcgcgagcagctgtataccgcgattgacgatgacacgaactggctcatcaacatgacggaaaatctgctggcagccacacagctggaaactgacaggaccaagctgaaaaccgctcccgaactgctggaggatctgtttcaaagtgctgtccggcagttggaccggcgggcaagggaccaccacatctcagttgatctggaggaccagacgctcatggcgtccatgaacgcggggatgattcagagggtcatcatcaacatgatgaacaatgcgatccaatatacgcccaaggactcccatatcattctgagcgggacccgcaggaaggactgggtggagatcagcgtctctgatgatggccccgggatcccggatgaggcgaaaaagcacctgttcgatctgttttataccgcggagcagggaaagcctgacagcaagcggggactggggctgggactgcatctctgccagtctatcgtcaatgcccacggggggacgatcaccgtctccgatcacgcaccatcggggacaaccttccggttcaccctgcccgcagttcggacagacggcgtgaaatgagcgtccaggacggcggtttttcattaatgttttgttaataccgccagaaatttcttaatccccttttataacgcgctgcgctattctagaaaacgcgaacgggagaatagggggcatctgtgcctgctacccggagcgaaaggagaatcttatgaaggagtatctgctgattcaagtggccgccgctgctgccattgggatcgccgcgtggcggactcttccggagacgatgatgtgtgcagcctgcgggcagctccaaagaagaaaggagttttcaagatgatggatgtattgatggtaggcaccctggcggtcagcttcggcctggtatggctgctgatccgctggtgtcagaaacagctggacgacccggagtcgtaagcgcagaaaggagatcataaccatgattgcacttggaattatcgttctgctgctgggcgcttatctcgtttacgcgctggtgcatccggagcgtttctgagatgcctgataccgcagaaaataggaggaatacgatatgttgcagctggcgctgacaatcatcatctttctgatcattgtcattccggttggacggtatatgtatcatatcgccacatggaaccacacactggccgacccggtctttgaccgtctggacggcgtcatttacaaaatcggcggcgtgaatccccatcagggtatgaactggagacagtacgctctggctctggtgggaaccaacgcggtcatggtggccatcggctacctgatcctgcgcattcagagcgtcgggatcttcaaccccaacagcatcggcaacatggagccgaccctggcgttcaacaccatcatcagcttcatgaccaacacgaacctgcagcattactccggcgagtccggactgagctacttaagccagatgctggtcatcatcttcatgatgttcgtctctgccgccagcggctacgctgcctgcatcgcgttcatccgcgggctgaccggcaagaccaaggacgacgtgggcaacttcttcgccgacctgacccgcatcaccacccgcctgctgctgccgttctccatcgtgggcggcctgctgctggtgtggcagggcgtgccccagaacttcgacgccaacatcgtggtgaatacactggagggcaccttccagaccatcgccatgggtcccatcgccgcacttgagatcatcaagcacctgggcaccaacggcggcggcttcctgggcgcaaactccaccaccccgctggagaaccccacgatcatctctgacatgatcgagctgtactccatgatgctcttccccggcgcctgcgtcatcaccttcggcaagatggtgcgcggccgcaagaagaaggatgccgccggcgacaaggcgctggccggcagcgaatccgccggccagctgtctgcgggcggagctgagcagggccccgcctgaaggaccacagcctgacggcgtccatctacggctgggagggccgcacgatcttcctggccatgggtatcatcttcctggtcggcctgggcgtgtgctactggtcggagctccagggcaacccggctctggcaaagatcggcctggatcagtccatgggcagcatggagggcaaggaggtccggttcggcatcgcccagtcggccatgttcaccaccaccacgacctctttcaccaccggcaccgtcaacaacatgcacgataccctgacgcctctgggcggcatgatccccttgctgcacatgatgctgaacgtggtcttcggcggcaagggcgtcggcctgatgaacatgattatgtacgccatcctggcagtgttcatctgcggcctgatgattggccgtacgcccgaatacctgggcaagaagatcgagggccgggagatgaagctcaccgcgctgtgcatcatcatccatcccttcctgatcctgttcttctccgcgctggcggtctccacctccggcggcctggagggaatcaccaacccgggtttccacggcctgagccaggtgctgtatgagtacgcctcttccgcggccaacaacggctccggctttgagggtctggcagacaacagctacttctggaacatcaccgcaggcctggccatgttcttcggccggtacctgtccatcgtgatccagctggccatcgccggttccctgatgcgcaagcggtttgtcaacgagaccgtgggcaccctgcgcacggacaccctgtccttcgctgtgatcttggtgttcgtagtctacatcttcgcagcgctgaccttcttccccgcgctggcgcttggccccatcgcagagcatctgaccctgtgggcctaaggagggcgttttcatatgagtaagaaacaaaataagaaatttatcaccccggagatcctccgggggcggtgaagggcgcgttcgtcaagctcaatccccgctatatgatgcgtaaccccgtgatgtttgtggtggagatcggctgcttcatcaccctgctgctctccttcttccccggcctgttcggggacgtggacgcaggctccctgcggatctacgacatcatcgtatgcgtgatcctgttcatcacggtgctgttcgccaacttcgccgaggctgtggcggaaggccggggcaaggcccaggccgccagcctgaaaaagacacagaaggacacggaagcccacctgctccatgaggacggcagcgagaccatcgtccgttccagtgagctgaaaaagggcgacatcgttctggtggtggctggcgaggtcatccccggcgacggcgaggtcattgagggcatcgcctccgtggatgagtccgccatcaccggcgagtccgcccccgtggtccgcgagagcggcggcgacttctgctccgtcaccggcggcaccacgctggtgtctgactggctgaagatccgcatcacctccgagccgggcaacagcttcctggaccggatgatcgccctggtggagggcgccagccgcaaaaagacccccaatgagatcgcactgaacaccctgctggtgtccctgaccatcatcttcctgatcgtggtggtgaccatgtatcccttcgccgtatacagcggcgtacagatccccgtctccaccctgatcgccctgctggtctgcttgatccccaccaccatcggcggcctgctgtccgccatcggcatcgcgggcatggaccgtgtcacccgcttcaacgtcattgccatgagcggcaaggcagtggaggcctgcggcgacgtggataccatgatcctggataagaccggcaccatcaccttcggcaaccgcttggccgccgacttcttcccggtggagggcgccagccgcagcgatctgatccgctgcgcggccctcaccagtctccacgatgacaccccggagggcaagtccactctggagctggcccgccgcctcggcgataacagcgtggagcccgcgggttccagcttcctggagttcacggcccagacccgcatgagcggcgtggacctgcctgacggcaccaaggtgcgcaagggcgccagcgacgccattgagcagtatgtgaaggaaaacggcggcaaggtccccgcggatctccgcacccatgtggaggaggtctcctccctgggcggcacgcctctggtggtgtgcgagaacaacaaggtcctgggcgtcatctacctgaaggatacggtgaagcccggcatggtggagcggttcgagcgcctgcgggccatcggcatcaagaccatcatgtgcaccggcgacaaccccctgaccgcggccaccatcgccaaggaagccggcgtggacggctttgtggcagagtgcaagcctgaggacaagatcgccctgatcaagaaggagcaggccgagggcaagatcgtcgccatgaccggcgacggaaccaacgacgcccccgccctggcacaggccaacgtgggcctggccatgaactccggcaccactgccgccaaggaagcggccaacatggtggacctggattccgaccccaccaagatcctggaagtggtggagatcggcaagcagctgctgatcacccgcggctccctgaccaccttctccatcgcgaacgacgtggccaagtacttcgccatcatcccggccatgttcaagctggctgttcctgagctgaacgtgctgaacatcatggggctggcgacctcttacagcgccatcctgtccgcgctgatcttcaacgccattatcatcccctgtctgatccccctggccatgaagggcgtcaagtaccgccccatgtcctccgggaagatgctgggccggaacatgatgatctacggcctgggcggcatcatcgcccccttcgtgggcatcaagatcattgacctgatcatcgccccggtgctggctgccctcggctttggtatgtaaggaggaacctgaatgatgaacgagaagaaacatggcattggccacaatatccggcaggccgttctggtcaccgtggtattgctggtgctgtgcggcctggtatttccggtgctgctcagcggcctctctgctgtgattttccccagccaggccaagggctctctggtgacggcagacggcatcgccgtgggcgccaagaacgtgggtcaggacttcaccgaggattactttatgtggtgccgtccctccgcgtacaattacaatacttactatgaagaggacaccgacggcgacggccaggtggagcagtactacaacgacggttctgaattcgccggcctgagctccggctccaacaactacgccccctccaaccccgccctgacggagcgggtggaagcggacatcgaggaattcctggagaagaatcccggtgtcagccgggaggatatccccactgacctgatgactgcctccggctccggcttggatccccacatctctcccgcctctgcggaggtgcagattccccgcattgtggaggcctccggcctgagtgaggatgaggtgcgccagatcatcgccgacaacaccaagggcaagaccctgggcgtgttcggagaggagaccgtcaacgtgctgggcgtgaatctggacatcgccctggccatgggcctggtgggtgagatctccaagtaatcacgggccccggatgccttcttgggcagaggacactggtatgcagtttcattttgagaaaacgctggaaaagcggtatgagccgcaggtcactgttacgaacgagaccccggcgtggctgatgatttgcctggcggagtccataaaggactggatcggccagagtcccagaatcttttgcaaaagtgaggagccgtacctgcagttcggctatgaggtgctgacgttcccggttgcggagtttgcacagattttcggcccgctgatctatgcgatcaatcaggcatggcctgtgcaggtatttggaatgggaagccaggatgagctggtcgagctgtccttcacaaaggaggggacagcccccactatccagcagaagaacgtctccgggattccatgtgcggaattgagagacctgtacttttgcgtgaagttcccggatcctctggcggcggactgtatgttccgtttgctggacgcggtggagaaaaagtctgctgccgtggccctggagtgggagtacgccgattttctggaacagcagcggctggcaagaattgaccggacactctcctattgctatgtctcccttgaagaagaggagagcgcggacccggtcggatggctttccggactgacgcttcagcagaaatgcgaactgtggcggatgtttttgggaaagcggctatttctgccggaattcgaatggctcagagatgcaatgctccagggagctgttccaaactggatcgagtggcatttagcactctatcgtgttctggaggaagagaacattcgctttttctgtaaggacggacaatttgagctgctggacaaggaaggacaccgcatctatttcggtgtagaccattccgaggcggcagagcaggtgctgatgaaagtcctgttcccgctcaaccaatgaccgagagattctgaaataaggctgaaaggcggaccggtacatccggttcgcctttcagcctcttatgattccttaatacgggaaacgctttctttttcccgatttaagctgaaaagcagtatgataaggccaaaggaagggatgattatgatgacctggaaaacgaggctcctgcattttgagcgcatgtgtgatgggctcgtggagcatttcctgcttcaacacaagatccttggatttctattgatttttattgggatgcctctggtgacgctgtcggcagtatgtatttgctccaccgttcttgtactgccgctggccttggcgtttgggtacctgtgaagaggaccttaatacaattttaatacgagcccttaaaaattaatgcccctttaagacgaaaagtggataatgtgattaagactccataaagacatattaaggggtggggcttacgcagcggccttttcataaaagctggtcgtctccgtttcggatcatcatattcggatttctcttggtgattctgctggggagcttcctgctgatgcttccggttgccacaaaagaaggtgttgtcacgccgttttcggatgctctgtttactgccacgtcggcggtatgcgtgacaggcctggttgttcacgacactgctacttactggtcgaatttcggacagttcatcatcgtattgcttatccagatcgggggccttggggtggtaaccgtggccggtgctttcggtatcctctccgggcgccggatcggcctgatgcagcgcagcacgatgcaggaggccatcgctgcgccgaatgtgggcggggtcgtgcgcctgacaggttttatcctgaaaactgccttggtggtagagctgttgggggctgccgcgctgttccccgttttctggcaggaattcggcttgataaagggactttggtatgccctgtttcactctatttccgccttttgcaatgcgggattcgacttgatggggatcaaggagcccttttcgtctcttgtggattacgcggacaacccggtggtctccgttgcgatcccgctgctaattatcatcggcggcattggattcttgacttgggatgacatccgtacgaaccgcctgcacataaccagataccggatgcagagcaaggtgattctggtggtcaccggcagtctgattctgcttcccggcatctatttcttcctgttcgagtttgcgcgggagcctgtggggaagcgactcctcttatcctttttccaggcggtcacgccccgaactgcgggttttaatacggcggatttgaccgctatgagcgaaagcgggcagacgattatcaccatgctgatgctcataggtggttcgccaggctccactgcgggcggcatgaaaacgacaacgctggcggttcttctggcgaacgcgctggcggtttttcggcgcaatgagtatccgcatttctttaaccgccggatctccaaagagaccatctcccaagcggcgacaatttttgcgatgtatctggggctgtttctggccggaggactggtaatcagccgaatggaggggcagcctattctggacagcctgtttgaaacggcttcggccatcggaactgtgggcctgtccttgggactgacgccgcagctgcatacggtctcacgcctgattttgatcggcctgatgttctttggacgggtagggggctgacgctgatattcgctgccctttccagcacccagaattccagcgcccgactgccgcaggagcggattacggtagggtgaatctgtaaataaagaggatgaaatacatgaagacaattttgctgatcggtttaggccgcttcggccgccatgtggccatgaagctccacgaattgaaccatcaggtgatggcggtggatcaggacgaggaaaaagtcaaccggattttgccctatgtgaccagcgcccagatcggagacagcacaaacgaggaatttttggcctctttgggggtgcgaaactttgatgtatgtatcgtcgctatcggcgataatttccagagttctctggagacggcttccctgctgaaggaggcgggggcgaaaaaggtggtggcccgggccgcacgggacattcaggccaaattcctgctgcgaaacggggcggacgaggtcgtctacccagagcggcagatcgcggtctggaccgccatccgatacagctcggataatatttcggactatatcgcgctgggggacgatcatgccatctttgagattcaggttccggataactgggtcggcaagaccatcggccagctggatgtcaggaaacggcatcatgtgagcatactggccatcaagcagaacggacacttcgccatgacggtcattacgccggagacctgtctcccggccaacagcaccatgctggttttgggaacaaaccagaacgttcaaaaatgcttccacatctagcggctgcggctccaggcatggaaaggacaggttgggatggagtatatgattttgcttggcggccttctcgtgtttgcgctggtcggtttctggatgatgggaagggttgacaggtttctgaatgcggcgcgggcagagcaggaggggcggcagcatgccgagtgcttgaagatcgcggcatcggacccctgtgtgatgcagcctgtttttaaaactgtgtcggcgcttaaggagcagcacccggacttgtggtgtgagctgtccttcggaagagaagcggaggttttgggatgtctcagcacaggcaatgtggacgttgcgattctccccggtgagacagggggcggagcggcgtttgaaagcagagactttctgttttcgccggtttctttccgggcggtggaggattgcacgaccttgtcatctatcgacacaagcgtgcggcggcaaaggatattgctgaaacagaatacatctgcttccctggctgcggaatttgttcagagaatttgtgaacagaaaccgtagaaacgtgctataatagagccgtttgaagggaggcggtaatatggagacttctgcgcaggtcggacggggagagcggaggcggaaaggatcccttacgatttttgccggttatttctccggcacgggaaagacctaccggatgctggaggctgccggccgcgccgtgcgggctggagaggatgttgccgtcggcctgctctcctgcagccaatggccgcagacgcagatcttggcggatggctttgagacgctgccgctcaaagcgttttcggaggcggggaagaccgtttatgagcttgacgtggatgcctgtctgaagcgcggcccaaggcttctcttgatcgacgagctctctcatgaaaacgcgggcggctcccgccacagaaaacgctgccaggatattgaagaactgctgcaggcagggattgatatctatacgacgctggatgtacagcacattgagagtattcaggacaccgtttccgaaattttgggcgctccggccgaggagcggattccggacagggtgttcgatcaggccgcgcgcgtggaattcgtggactgtgaaccggaagacctgcgggaacgcctgatccggcaggaccggacggatctgctgtctgaatattcacagcccaaattgagcgcgcttcgggagcttgcccttcgccgctgcgcggaccggacggctctggatacacaaaagagccggggcggagagaggtaccggacccgggagcatgtcctggtctgcctttccgcagcaccttccaatgaacgtgtcatccgaacggctgcccggatggccgacgcgttccgctgcggctttacggcgctgtttgttgagacaaaaaattttcagtccataccgcagccggatcggaaccgtctgagggccaatctgcgtttggctcaacaactgggtgcatccgtcgagacggtatatggcgatgacgtggcctaccagatcgccgaattttccaggctgtccggcgtgaccaagattgtgctgggccgtggagagacttccaaccgcatcctgttttggaagccctcgctgacggaacggctggttgagctcacaccggaactggacatccacatcattcctgacactggaacagcaaggcggtttgcctcccattacaaaaaagagctgtatgcacccgcggtccccctcctggatttgctgaaaagcactctgctcctggtgctgtctacgctggtgggccttatcttctattatctgggcttgagcgaggccaatatcatcacagtctatatcctgggggtgatgctgacctctatcttcacaaagagcgcggtttgcagctttctgaactcggttgtgggcgtcttggcgtttaacttcttttttacggagccaagattttcactgcatatctacgccagcgactatatggtcacatttttggtcatgtttctggcatcccttcttacaggctctctggccgccaagctaaaatctctggcgaagcactcagcccagctggcatggcggaccaagcttttgtttgaaacgaatcaggaattgcagaaggccggaacccaggacgagatcctttctgtcaccgcacggcagctgctgaagatttttcagcgcgatattgtcacctatcggtcagatcagggacagctggacgcgccgaagatctttccggttgatgatgcgttttccgaaagcaaatactccgccgcatcggagcatcaggcggcccagtgggttctgaccaacaacaagcgggcgggcgccgggacggagacgttttcggatgcgtgctgcacatatctggccgtccggaccgcagaacaggtatatggggtcataggcgtcgcggcctctggcgaggagatggattcctttgaaggcggactgctcctctcgatcctgggggagtgcgccctcgctatggaaaaccagaaaaacctggaggagaaagaggcggctgcggtcctggccaagaacgagcagctgcgggccaatctgctccgctcgatttcccacgacctgcgcacaccgctcacctccatctccggaaatgccagcaaccttctctccaacggagatatgtttgacgcaaagaccaagcatcagatgtatgtggatatttatgacgacgccatgtggctcatcaatctggtggagaatctattatccgtcagccgcctggagggagggcagatgaatctgcacctgtccacagagctgataggtgaagtggtggctgaggcgctgcggcacatcaaccgcagaagcgcggagcaccatctgcatatccagagcggcgacgagtacctgctggcgcagatggacgcgcatttgatcgtgcaggtcatcatcaatatcgtggacaatgcgatcaagtacacgccgcctggctctgacattgagattagctgggagcggcaggggcggttcgccgcactgtcggttgctgacaacggcccgggcattcctgactcggcaaaaccccgcgtttttgacatgttctacagcgcctcgaaccggattgccgacagccgtcgcagcatggggctggggctggcgctgtgcaagtctatcatcacggcccatggcggggagatcacggtggctgaccacgcgccccatgggacagtttttacgtttaccataccaattgaggaggttgaattgcatgaataaacccttgattttggtcgtggaggacgatgcgcctgtccgcagtctgatcacaacgactctgcgggcgcacgattaccgttttctctctgcggccaacggggaatccgctattctggaagccagttcgcacaatccggacatcatgctgttggatttgggactgccggatctggatggcgtagaggtgattcaccgtgtccgcacctggtcgaatctgccgattattgtgattagcgcccgcagcgaggacacggataagattgaggcgctggatgccggggcagatgactatctgaccaagccgttctccgtggaggaactgttggcccgtctgcgggtaacccagcgcaggctggctaccctgcaggccggagtggtgaacgaaggcgctgtattcaccaacggcaggctgaaggtggattatgctgcggggtgcgcgtttctgggcgaagaggaactgcatctgacgcccagtgagtacaagctgctatgcctgctgtgcaagaatgtgggcaaagtgttgacgcacaccttcatcgcccagcagatctggggcaggagttgggaaaacgatgtggcatctctccgggtctatatggccaccctgcgcaagaagttggaacgggatccggattctccgcaatatattcagacgcacattggagtagggtaccggatgctaaaggtggagtaacagcggatgcattccaatttcagtgaaaagatcgttttattcttcatgtgatgtgtgatgcattttgcggcacttgaaatactggattccatgggcataaatgagtcgagattgaaaaaaattgcctggacgactgtttgacacctatttgtaaataacccggagctgttgcggtgcaacggttccgggtacttctcctcaatgtgccgaaatttgtgcaactccacggaaccccttgtgctccaatgagtttctctttgacggactgagaactccaactttgcagaccattgcctcgaatgcagctgggcgcaccaaggaccgccgaaaattaaaaattttcggcggtccttgtctgcggctatgaaaaacggcccactgacaaattggagctgcgggggatgtcccatccgacagtgtgacaaaggcgaaagagacagccccggcgttcatgaggcagaggcgtcccggcagcggtctttaccgcaggtacagggcattccggctgatgagaaacgtaagagcggttgtttctgctgcctgtctggcctatccggcgtgatggggaaattggggttccaagtttttaagagccgacaaatcaactgggaggcgtatgcgcagaaactggaggctctgtgagaaggaggaagcctgtcccgaaaggggcaggcttcctttgctgtgagatggatactattgagagcggttaaagaggataaaaataaagtttatacggggccccatggtacaaccaagtaaaaaggcggccaaaacacgatgaagggactgtatgaactgttgtcatactgccggccctatcaaaggaccgcatacttgcgtggagtgattggcacggtattcccgcggtgtcataccagagagaacattgagctgcttatggaagtaaattgcgctgtccaacccgcagcttgaaaagaaccacacatgtgtctattcagaaggaaaaaccattcaacgttatgatgccaatatggaataaatttgcccagctacaaattgttgaatataaccttgattagctgcgcagggaaaagccgcagtaccgcgcggagcggttttttcgcaataggcacctagcgatattgtgtgttcgatgattattgatcgtcttcctgcagaaaaacaaggagagcagtctgggggttatctgttcttaaaaatgcttcctgccgtatctgcagtcaagagcgcatctgcaatttctgctttcggtgcgtttttgggtaccgactgaacaatcgtgcagaagggaatcagcttgccgtggagaattctgtgcagctcaggaataagggcatagcatttccggatgctgtgagtcaccgctagaatgccgcgctcaaaaccgacgccggatggatgggtgctgacctcaatgatgttgtccgtggcagatgtgcagatcttgcgttctcctgcgaatgttgccgcatagccgttctccggcagagggtggccaaccatatatccgcgatggccggaggccccccgacgcggctgttgcttctcgagtgcaggcaagccccggtttcaaaccatgtcaccattgcgtcacccattcctgcgacctaaaatcttgcgggaggagggcagatcatgcagggatctaccataacaatatcagggcttgcatctaaaaacagataggcgtcaaacacaccccggtcatcatacatcgcgctgagagaagagcggggagtctgctgagcacacctgaaatctggcatcttcggaaagccagagcaggcagaaaacggaaagtctttctgcctgttctgaatactggagttacttcttgtagtaggtgggtcggcccttctcgtcgtggtccttgtcgaaggtgggataggcgccgccgttgaagccgttgtagcccaggggattgcggaagcccagggggttcttgcccacaggatgggtctccagcagctccttgatcagctcactgtagccctccacaacggcctccaccagcagcttgtcgcccttctccttggtggccttggtggggttgccgatgacgccgtaatccaggtcgtccttctccagcagcgcgaaggtgccctcagcgccgtagaactgccagcggtgagaggcctcgccgggagccatcttccacttggggtccaccaggggcgtgccgccgccgtcgatggccaggtccatgtggaccaggtcgccgtacagggacagcgccatggaggtctccgcctcgtcggcgtgccacatgaagtcctccagcacgttcttgttgtcccgcaggaagtcataccaggtggaagccagaacgaagtagccctccgctgagcgacggttctgcaggctggcagggccgttgcccgcgaggcggcggacctgctgtccattcagtattatgtccgggacatcgaagaagagatagccaagcgcatgaagcagccggtcaaggagatcagcgaggtggaaaaggatgctgagagccgcttcgatgtcttcggcaacattctggcccaggtgttggcactgagtcctctccataagggggtattggagtgcccgcccgatttggcagagcgactccgaaggcgttcctctctggagatggtcacgacatcactttgccaacaaggggccggacacagactgcgcggtgctgctataaacgattggttatcccaaagcacagccctgtccaccaatttgggtggacagggctgtgccgtgcatgaaatggcaggttcagaattgaaaagtcgctgtgtctcttgattggcctccgccgcggcaatgaactcccggaatacaagggggcctgcctacggtaggaacaggggcaggggcctattggctccacatcgggctggatgtccgggtccggcagttctgcttccggtgccgggtgggcttttccattcagaacccgatgtacgcataaaaggcccgggccggttgttgcccgcctctgatgacaaatactgccccgtgccgccagggggccctggtgcccaaggccggggccagacatgggccagacttctggagggcgacattcaccccgccaccggcagccgacccggggaggccgccgcaattcccgcccccgggccgaatactgtgctgcggatcagacggagaacaacaggtcggagtaggtggggaaaggccagcggtcagagctggtgagggtctccagctgatcggcagcccgccgggcggtatccatatcggggatcaacacatcatggctgtatcgcatagcttccgcagcgtccgcgggaattgcagacaggtccgtctccagcttgtcggaggcggccatcagggcatccgtcaagctgccgatctggcaggcagtgctgacctcatactggcagcaggcacccaggtcctttttggtaccggcccggctgcacaggtccccggcaaaggcggagacggcgggtaggatttggcggcggatcatgtccgtcatggtccgtgcctcgatacagatgaccgtagagtagttctcaatgtggatctccgcccgggcctcgatctcctccttggtgtagatgccgtgcttgacaaacagatccacgtttttgggagcggtgtacatgggcagagcatcagcggtggaggtcaggttggagaggccacgcttcccggcctcctccagccaggcctcgtcatagccgttgccgttgaagatgatccgctgatgctcggtgaatacccggcggatcagcttctccaggtcggcctggaagtcccgggatacctccagctcgtccgcaaactgttccagttcctcggccatgatggtgttcagggtgatgtttggaccggagatggactgggaggagcccagcatccggaactcgaacttgttgccggtaaaggccatgggggaggtgcggttccgatccgtgttatcctgggggatagcgggcagggagtccacgtcgatcttcagcgtccgcttgccggtgctctggaaatccgtgtcgttgatgatggagtccaccacagcggagagctcgtctcccaggaagatggagagcacggcgggcggtgcctcctgggcgcccaaccggtggtcgttgccggggaaggccaccgtggcccggagaaagtcctggtagtcgtccacacctttgacgaaggccgccaaaaacagcaggaactgggcattctgccggggggtggagccgggcttgaacaggttcttgcccgtgtcggtggagagggaccagttgtcatgcttgccggagccgttgacgcccgcgaagggcttctcatggagcaggcacaccagtccgtggcggtcggccaccttcttcatcatttccatggccagctggttctggtcgcaggcggagttggcatcggagaacaccggcgccatctcatgctgagcaggggctacctcgttgtgcttggtcttagacaggacgccgagagcccagagcgtctcatccagatccttcatatacgcggccactctggggcggatggcaccgaagtaatggtcctccagctcctgccccctggggggctttgcgccgaacagggtccggccgcacattcgcaagtcctcccgcttctcatagagggccttgtcaatcagaaaatactcctgctccggccctacctgggcagtgacccgcttcgtctctgtgtcgccgaagagccggaggatgcggaccgcctggcggctgacctcgtccatggaccgcagaagaggcgtcttcttgtccagggcttcgccggagtaggagcagaagacggtggggatgcacaggctgccctccttgatgaaggcaaaggaggtgggatcccaggcggtgtagccccgggcctcaaaggtggcccgcagaccgccggaggggaaggaggaggcatccggttcaccccggatcagctccttgccggagaattccatcatgatctttccgccgcccacaggggcgatgaagctgtcgtgcttctccgccgtgacgccggtcatgggctggaaccagtgggtgaaatgggtggcgcctttttccacggcccactgcttcatggcctcagcgatctcattggcggtggagaggtccaggggcgtcccctccgtcacgcacttcttccaggcgctgtaagacgccgaggagagacgctccttcatagtgccttcgttaaataccagactcccaaacagctccggcaatttcttcgtctcacacatcacacaaaacctcctgtctcaaattcgttctgtatcaaaaaggaatgcggagagctttctcacattccgctctgaccgtagttggagaggacccgggcggagggatcgtccacgtcgcagccctcccaggaccggttgggcatccagaagtcccggatcatccgggcctggccggggtaacactgctcaaagatctcccggtacagcaggctctccttggtgaagggcggacagtagtcatactgtttgcgtcgggtctcaaactcagaatccgtgtacttctcctccgcgtaagccttcaggtcgtccaccatggagtggcccactgcgtcggagaaggcggccttctgccgccagaggatgctgtccggcagcaggcggtccttttcaaacgcgtggcgcagcaggtacttgcccatgccataggtgttcattttcagcgccggatccaccgccatgacgtatttcacgaagtccaggtcgccgaaggggacccgggcctccagagagttgacggagatgcaccggtccgcccgcagcacatcgtacatgtgcagctcatccacccgctttttggactcctgctggaaggctccggcgctgggggcaaagtctgtgtacttgtagccgaacagctcatcgctgatctcgccggtcagcagcacccggatgtccgtcttttcgtggatggccttgcagcagagatacatgcccatgctggcccggatggtggtgatgtcccaggtgcccagggcggcgatgacgacgggcagggccgccagaacctccttccgggtcatatagacctccgtgtgatcggcgccgatgaactccgccgcctcccgggcgtacttcaggtcgatggcatccgtgtccatgccgatggcgaaggtacggatcttcttccccagaattacggagctgatggcgcacaccagggaggagtccagcccgccggagagcaggaagcccaggggagcgtccgcgtccagccgtttatccaccgccgcgatcagcttgttgcggatgttgcggcagacggtctccaagtcatcgggggagtactgcgtgacggtggtgagatccgcatagcggacaaattttccgtccgcgtaatagtgtcccggcgggaaggggcggatccccttacacaaccccaccaggtttttcggttcgctggcaaagacgatggcgccggagcggtcatagccgtagtacaggggccggatgccgatgggatcccgggctgcgatgagctcatcccgcttggaatcgtagatgatgagggcgaactccgcgtccagcttggcgaacatctccaggccgtactcccggtacagaggaagcaggatctcacagtcgctgccgctgcggaaggagtagcctttttccgtcagctgccgcttcagggggcggaagccgtagatctcgccgttgcagaccacatagtccccgtccagctcaaagggctgcatccccgcctccgtcaggcccatgatggccagccggtgaaagcacagccagccggacggcgtctcgaggatctgagacatgtccggtccccgggaccgggttcggtcaaagaagggcagaagttcctccttggtgtaggtctttttggaaaaacccataattgcgcacatagatagaagcacctccgaaataaaaaagatcgcagctccgtcctgaaatttcaggacgaatagctgcgatccgcggtgccacctgacttgccccctgatcggggacctctttgactaggctccaacaagcccgcgtgaggtaacggtcacgactcgtttcacttactggcggtctcccgcgttcagatcacagctacggagtgttcttcccgcggattctttggtacggggttctcaccatcccccgctcactggcccggaacatccgcggtacttttctccatcaacgcctttgctgatgttaaaattatggtctaaagattaccactggggatatccgctgtcaatgtgggaatatcccaaaacccagctgaaaatttcctgaaatttctccatccttgtgtcagggggatgtcccatctacccaatggagcgtaccagattcgtgtagccggtcagataccggtccacctccgcagcggcggagcgcccttcggcgatggcccacaccaccagggattggccccggcgcatatcgccagcggcgaacaccttgtccgcattggcagcatagctccccggcgctgtgcggaccgtcctgtccgcctccacaccgaaggcctcgcacacgccccgctcacacccggcaaagccggtggcgccgatcaacagctggcagggcagggtatccccctccgtggtgaccacaccggtcagggaaccgctttcccccgccaccaggctctggacctggacgccgaaccgccggggatcctggcccgtaacggccagcgcctcttcgtgggcgtaatccagcggcaggcttcccgcagcgtccaggtaatccgtccggggacggcgcaccagctgggtcacggagcggcagccttgccgcagggcggtggccacacagtcgctggcggtatcgccagtgccgatgataaccacatccagcccggaggcggagggaaccgccgcctccgccttgccgaactgagcccgctccacagcagccttcaggtactcggtgccgtagcatacgccggagatgccggtggtgtccagtcccaagggccggggtgctccggccccgcagcagaggatcaccgcgtcgtactccgccagcagccgctttgccacggcaccctctgaggcgtccacaccgcagacgaaggtgacgccctcctcggtcatcaggtcgatgcgccgccggaccacagatttgggcagcttcatattggggatgccgtacatcagcagaccgccggggtgctccgcccgctcgatgacggtgaccatgtggccccggcggttcagttggtccgctgccgccaggcccgccgggcccgagcctaccacgcagaccttcttccccgaccactggggcggccggcgtgggcggagcttcccggcgccaaaggccgcttcgatgatgctcaactcattgtcccggaccgtaatggggtccccatagatgccgcagatgcaggcgttttcgcaggggcggggcacacgcggccggtgaactccggaaagctgttgaccttcagcagccggctgagggcgtggccccagttgccggagaggatcatgtcgttccactcggggatcaggttgtgcaggggacagccaaaggcctttccctcatatatcatccccgcctggcagaaggggacgccgcagttcatgcaccgggcgccctgctggcgccggatctcctccggcaggggaaggtggaactcctcccagtcccggacccgctccgccgcgggccggcggccatcctcccggcgggtatattccaaaaagccggtgggttttcccatgttgtccagcctcctctcaagctctggtattggcgtagaacgcctcgatctccgcctgctgacgggtcatgcctttctcctcgtactgggcgatggaccggagcatccggtcgtagtcccggggcatgaccttcttgaagcaggggacgtaggagtggaaggccgccaggatcttcttcccccgggggagccggtggcggccacatgggcctcaatgagggagcggagctcggcgatgtcgtgaggctccgtcagggtgtccgtcatcacctggtccttgttgaggcgcatatagaggtcgtgcttttcgtccagcacataggcgatgccgccggacatcccggctgcgaagttctttcccgtggggccgaggatcacgcagcggccgccggtcatgtactcgcagccatggtcccccacgccctccaccacggcgatggcgccggagttgcggacgcagaaccgctcgccggccatcccgttgatgaacgcctggccggaggtggcgccgtacagagccacgttgcccacgatgatgttctcgccggggtcgaaggtgctgtccttgggtggatagagtaccagcttgccgccggagaggcccttgcccagcccatcgttgcagtcgccctccagctccagggtcagtcctttggggatgaaggcgccgaaggactggcctccgccgccatggcaggtgatgacataactgtcatccggcagggagtccccgcactgccgggtgatctcggcgccgaacagcgtgccgaaggcccggtccgtggaggagacggtgagctccaaccggccggtccgcttccccttcagcgtcttgcccagtttggccagcagcacgctctcatccagggtccgctccagatgaaagtcgtaaacatctccgggattgaagtgggacggcccgccgctccagggattttccagcaggctgcggaggtccagggtctccgcccggtgggtcaccagcttctcccggacccgcagtaggtcactgcggcccaccagttcatccacggtgcggatgcccagggccgccatatactcccgcagctcctgggccacgaattccatgaagttcaccacgtactccggcttgccggagaagcgggaccggagctggggattctgggtggcaatgcccgccgggcaggtgtccaggttgcacacccgcatcatgcagcagcctagggccaccaggggcgcggtggcaaagccgaattcctccgcccccagcatacaggcgatggccacatcccgcccggtcatcagcttgccgtcggcctccagggccacctggctccgcagaccgttggcgatcagggcttggtgggcctccgccacgcccagctcccagggcaggcccgccccgtggatggagctgcggggcgcggcgccggtgccgccgtcatggccggagatcagcaccacctgggcaccggccttggccacgccggcggcgatggtgccaacccccgcctcgctgaccagcttcacgctgatccgggcccggcggttggcgtttttcaggtcatagatcagctgggccaggtcctcgatagagtagatgtcgtggtgaggcggcggagagatcagtgtcacgccgggggtggagcaccgggtcctggcaatccagggatagacctttttcccgggcagatggccgccctcgccgggcttggcaccctgagccatcttgatctggatctcctgggcgctggtgaggtaggcgctggtaacgccgaaccggccggaggctacctgcttgatggcggagcaccgctcatcgcgcaggcgcgccgcgtcctcgccgccctcgccggagttggacttgccgccgatgcggttcatggcgatggccaggcactcgtgggcctcctgggagatggagccgtagctcatggcgccggttttgaatcgcttgacaatggacgccacaggctccacctcgtcgatggagatgccgccgctctcatcgaactggaagtccagcagcccccgcagggtatggggcttggcaggctcgtccaccagggcggaatactccttgaaggtctcgtagctgccctcccggacggccttctgcagcagcaggatggtccgggggttgtacatgtggtcctccttgtccgggccggaccgcagcttgtggatgccggtggagtccagcgtggagtcgtagcccaggcccaggggatcgaaggcctggctgtggttccactccacgccctcctcgatctctgccaggccgataccctccacccggctgactgtgttggtgaagtacttgtccaccacgtcccggttgatgcccaggcactcgaagatctgggcggactggtaggactggatggtggagatgcccattttggaggcgatcttcacgatgccgtggaggatggcgctgttgtagtcgttgacggccgcagtgggatccttatccagcatccccagggtcaccagctcctctacgcactcctgggccagataggggttgatggcctgggcgccgtagcccaggagggtggcgaagtggtggacgtcccggggctcggcgctctccaggatcatggagactgcggtgcgctttttcgtccgcaccagatactgctccaaggcggacaccgccagcagggaggggatggctacatggttctcgtccaccccccggtctgacaggatcaggatgttggtgccattcttgtaggcccggtccacgttgacgaacagccggtccagggcattggccaagggagagcccttgtagtacagcagggagatggtctccacatggaagccaggccggtccatgtagcggatcttcatcagatccacggaggtgaggatggggttgtggatctggaggactgtgcagttctccgctctttcctccagcagattgccgccggagcccacatacaccgtggtgtcggtgacgatctcctcgcggatggcgtccatgggcgggttggtcacctgggcgaagagctgcttgaagtagctgaacaggggctggtgcttttccgacagcaccgccagcggtgtgtccacgcccatggcggaggtgggctccgccccatcccgggccatggggaggatggcgtccttcacctcctcataggtgtagccgaaggccttgtacagccggtcccgccgctcctgggaggaccgctccacacgccggttggggatgggaagatcccgcaggtataccaagtgggcatcgagccactcgccgtagggctgctggcgggcgtaccgctccttgacctcggcgtcgtccaccagtcgaccggcagtcaggtctgccagcagcatccgccccggctggagccgggacttcttcacgatcttctccggcgggatgtccagcacccccacctcggaggagagaatcagctgcttgtcggtagtgagataccaccgacaggggcgcaggccgttccggtccagcaccgcgcccaccgtgtccccatcggagaacacgatggccgccgggccgtcccagggctccatcatggtggcatagtagtggtagaagtcccgcttctcccggctcattttccggtcgttggcccagggttccgggatgcacatcatcaccgcctggggcagtgggatgccgttcatcatcagaaattccagggtgttgtccagcatggcggagtcggagccgctctggtctaccaccggcaggatcttgtccatgtccgcctccagtacggccgagtgcatagtctcctccctggccagcatccggtccacgttgccccggatggtgttgatttcaccgttatggaggatgtagcggttgggatgggcccgctcccagctgggggtggtgttggtggagaaccgggagtggaccagggcgatggcgctctcacaatccggctccgtcaggtccgtgtagaacttccgcagctgccccaccaggaacatgcccttgtacacgatggtccggctggagaaggagcaaatgtaggtgttcacattggattgctcgaactcccggcggaccacatacagcttccggtcaaagtccaggccacgggcgcagtctacaggccgggccacaaagcactggcagatgcagggcatacagtccagggccttccggcccagcacctccggatgggtgggcacatcccgccagcccaggaagtccagcccctccttggacgcgatgatctccagcatcttctgggcctgggcccgcttcagcgcgtctgcggggaagaagaacatgcccacgccataatcccgggggccgcccagggcgatgccctcggcggaggccgccttcaccatcagcttgtgtggcacctgaatcatcagccccacgccgtcaccggtctcgccggtggcgtctttacctgcccggtgctccagcttttccacgatcttcagggcactgtccactgtggcgtgggacggcgtgcccttcaaattcaccacggcgccgatgccgcaggcgtcgtgctcccacagggatcatagatattgtgtatgttctgcgctggtccactcattgggactgcctcccttgtcgtttcatcgtcaggcttcagcctgttgtgtaccgctccaggatcagccgggcggtctctgcaagccgcagccccgtgtccatgctgtacttctgcagaaagcggtgggcctccgcctcgctcatgaggtttacctccatcagcaccgccttggcccggcagatcagccgctcctcctcggcacttcgctggatatgaagccggggagccggggcgccgcctgcaaggactccctgggccagatccagcgaggcgaagaactccgcccgggaggaggggacggccaacttgatgaggttcctgtccccacacagctccagattcccgggagaggagatgaccagcaccggggcgatgcccgtgaggtccacggccagcatctccgcagtcatgtcccgcagccggaaaccgcagatgacgacggctccgcccagcttccgggcggctcggatggtttccgcgccgctgaagcaggagatggacggcgcgaggccgccggagcccagaatgcgggtgatctgggcgtgggctttctcagaggcaaacgccaatatgatcctgtccatggaatttgcccccctcctctctctgcggccctgtcagaagggccggcaggtcagtacgccaccagatactgttccagctcccactgggacacctgggcggcgtacgaccggcactcccgacgctttccggccagatactgctccgtcacgtgggcacctagcgcgtccgtaatgacgctgtctgcctccagggcccggacggcctcctccagagagccggggagccgctggatgccggaggcgtctcccacctcgtaaaggttgccggtgagggggcggggggcgtcatctgctgctcgatcccgtccagtcccgcggcaaggcacgccgccagggccagataggggttgcaggcgggatcagggctccgcagctccacccgggtgctgtttccccgcggtgttggaatgcggaccaaggcggagcggttgccggtggaccaggccagatggcagggggcttcgtagccgggcaccagccgcttgtagctgttcaccagtggattggtgacggcacagcatccccgtacgtgtcccagcagtcccgcgatgaactgataggccagcggggacaggtgccggggatccgcctcgtcatagaaggcatttttcccatcccgaaacagggacatatttacgtgcatgccgctgccggcggcgccgctgacgggcttgggcatgaaggtggcgtggaggccgttcttctgggccagggtcttcaccgccagcttgaaggtcatgatgttgtccgcagcccgcagggcgtcggtgtactggaggtcgatctcgtgctggccggctgccacctcgtggtggctggcctccaccgccacgcccatctgctccagattcaggcagatctcccggcgggtcccctccccatggtccagagggcccaggtcaaaatagctggcctcgtcggaagtccggatggtgggctgaccgtcttcatcggtctggaacaggaagaactccagttccgctcccacattgcaggtgaagcccagggcgtcggcacggcggagcacccgcttcagcacacctcggggatcaccggcgaaggcggtaccatcggggttgtggacgtcgcagatcagccgggccaccttgccgtactggggccgccagggcaggatggcaaaggtgtccaggtccggccagagatactggtctgattcttcaatgcggacgaatcccgcgatggagctgccatccatcataatctggttgtccagcgcccgcccgatctgagaggcggtgatggctacgtttttcagctggccgaaaatgtctgtgaactgcatacggatgaactgggcatcctcctcccggaccagccggatgatgtcctccttggtgtagtgacgcatgagcctgactcctttccgatggtgaccgtgtatggacgcggagcgcccctccgcgaaaaattttaaaaagaaaaaagagcaaaggataccgccaaagggcgcctttgctctcagtgctattattatacgaactttaaggcggtgttgtcaagacacttgggggcccggaatccccacagacggaaaatttgtgggaccgcctaaaatcgttccgccgtccccaggagctttggcgaaatcgacaaaaaatggaggaatgcgttgacagctccgacaaagctgactgcgcgcccgccatcaaacaaaggtactttggcccaccatcccacagcgccttgtttgatacacgcaacgagacatatcccactcaatggcgggggcatttcttttggcaaaagaatatgaccgacacatcagcggttatgaagatcgtcagcacaccatcttgcaggacagcgattgccccgcaggccccggatgcccggtcccctgaccacgccggacgaaaagggccgttgcccgcaggctgctctggaacggcccttccggggaaatcttccattggcagcagttatcccatgacttaggatgcccgctgccgtgcagctgggaccgcgtttcccccggcgggaaggaaacacaaaacgcgcccggaccgggaatcccggtccgggcgcggcgcgtggagacagcgcggatttacggctgccgcaggtggatctggcaggagggcagatcgtagaagggctctgccgccgtaggggtcaggccggatacggccccggtctggtacaggacggaggaggacttaaagcacaagggcagaataggcgcttgctgctgaagataggcacacaggtccgacagagctgcggcccggtcctccgctgcggcgcaggcggccaggagctgctccgtctggggatccgcccagccgccgtagttcagactgccgccggtgcccaccagggcggaaaggtcccaattcgcaggcagccgcacttcgccatagtacaggtcgaagttcccggcggccagggcggcggcatactcctcccagggcagggcctccacttggatctgaaggtcgaaatccgacagggcctgggcgatatgctccgcagcggaggccttgaaagtgttctcctgattcaccagcagggtcactgtgcgggtccggccggtgttcagtcccgctgcctccatcgctgcggcgaaatcgtcataggagtatagggactccagctccgccgggtagagcggggagacaggggagaccgggaactgggccgcccgggcgtgtccggacagcacggcgctcaccagcgtctcccggttgatgcccaggcccagggcccggcgggcggcgctgtcctgaaagggggcgcgggcggtgttgaagcccaggaactgaagcactgtggtatccgcatcctcatagctgatgttgccggtggcggtgatgggctccgtgccgatcaggtcggcagtaatcaactgcacctcgtgggaggagaactggtacagtatggcctcccggtccctggcggcggagagggcgatccgctccgcggggcgggactctccccgccaccagccgctgtgggacgccagacaggcacccgcttcatcggtggtgaaatagtaggggccggtgcccacaggggtgaggctttcctcggttccggacttgacgatggggatgtccagcagggccgggaggctggagtccgggcgggacagggttacgattaccaccccgtccccggcggagacagcggccacatgggccagccgggcgctgtaccgctgggaactcttggcccgccgcagggtggccgccgcgtccgccgccgtcaggggggacccgtcggaaaaggtgacgccgctgcggagggtgaacgtgtaggtgagggaggcggcgtcataggtgtagctctggcacagccacggctggggttccagctggcggtccaggcggaagagtccctcgtagatgagggagcccgccacctgctgcataccgtcggcacaggtcaccgggtccagcgtctggtccgggtcatagggaagggtgaacgccgcagggaggatcacctcctcctgctggtcggcgggctcctggtcccccagcaggccgttggcggactccacgggggcttccgtccagcagccggacagcagcagggtcactgcccccagcaggcacaggatctggatgcgcttggtcttggtcatggcacaggccctccggcaaagagtgtttcaaaggcagatcacggccacctgtgcgccccgggcctcgcccatcttccggtgggaccagaagaggtcggggcggcaggcggtacacaggccgcagatgtcgatatgctccggcgcgacaccggcgtggagcagccactgacggttcagacccgccaaatctacatggtatttgggccctcgacgctccagatacggccccgcctccggccccagggcagaggcccgcatggcctccggtacgtcgccgtcggtctcaaagcagcatttcccaatgcagggccccacggcagccaggatgcgttccggtctggcgcccagcaggcggaccatctcccggacggtcttctccacgattccagcggcacagccccgccatccggcgtggaccgctcccacgcacccggcgtccgggtcatggagcagaaggatgccgcagtcggcggagaacaccaccaggggcagtcctttttcagcggtgatgagggcgtcggcgtcgtagtcccggtcccggatcagacccttcccggcgtcggcggcggtgcagagccgcacatcatcccggtggacctgccgggagaggacggggtacgccgagtccatatccagggcggcgaaaaagcggcggtagttctcctccacgttctccggcgcgtccccgcgtccggggcccaggttcagggtatcccacggcgccggagacaccccgccccgccgggtggagaatccgtggcgcaccccgcccagcaggggagaggcgagccagaccagactctgttgttcatgggtgacaaatgacatggcgacctcctttgattgagcatgaaaagggacgtcaggagcgttcctggggatcgttcaccgggtccgcaaggcggcgggaaccctaccaccagatggtaccagtcagaaacagcagggcgctgacgaggaacaaggctgtaaaaggttggtgccttcggcgaataggtatccaaaggccagcagccccagggcagataccatcagacctatgccgatcagcatatttcgaatcgtgtgcagcaggcggatgctctcctgattttcacccacggaagcagctcccttctgtgaaaagaccgccccctgccctccggcaggagagaacagggagcggaagagataaaaatgaaaagacaaaggataaaagatagagtggagagtgaggagatgctcccaaaaggaaaggggctaggggaaacccatccgggtttccccagttgatctgccgaaggcagatcaagaaattccaatcattttcgccgcggcgtgtacgtggcgaaaatactttgacctaagcgccttgggcgcgttcaccagtccgcagactggtggtggggaggtcgagggggagcctgctccccctcgaaatcagttgtcgtggtactccttgcaggtgcacttcttccacttcaggccgctgccgcaggggcaggggtcgttgcggccgatcttgttgaccttgacaggctgcttcttggggcggtgccgtcgccgcccacgttttccaccatgcccttggccacccgctcccgcttgacctcctcgtccttcttcagccggacggagaacatgcggcggaccgtctcggtctggatggcggagaccatctcctcgaacatggtcagggactcctgcttgtaggcgatgaccgggtcggtgttggcataggcccgcaggcggatgccctgcttcaggtcgtccatggcgtcgatgtggtccatccagtactcgtccaccacgcgcagcatgatgacccgctccagctcccgcatgaggggcgtaccgatctccgcctccttggcctcgtaggtcttctctgcggcctccaggaagaggtcggtgaagtcctgctgggtcttgtcggcggcgtcgtcctccgtgaactggaaggtgtccttggggaagtacagcccctccaggccgcgtagcatctcccggcagccggcggcgtccagggcctgggcctcgccgaagaccatagccacgtggtcggcgatggcgttgcgggtcatggacaggatggtgtccttcaggtccttgccgtccagaacctcccggcgctgctggtagatgatctcccgctgcttgttcatgacgtcgtcgtactccagcacggacttgcgggactggaagttccgggactccacggtggtctgggcgttctcgatggccttggtcagcatcttgttctcgatggggtgtcctcgtccaggtcgaacttctccatcatgttctggatccgctcgccgccgaagaggcgcatcaggtcgtcctccagggagatatagaaccgggtctcgccggggtcgccctggcggccggcgcggccgcggagctggttgtcgatccggcgggattcgtggcgctctgtgccgatgatgaagaggccgccggcggcgcggaccttctccgcctcctccgcgatcaccgccttgtgctgggccatcttctcggcaaacagcttccgggcggccagaatctcctcgttgtctgtttcggcgtagccggtggcgtcggcaatgacctcatcggagtagccggccttcaccaggtctgcccgggccaggtactcggcgttgccgcccagcatgatatcggtgccgcggccggccatgttggtggccacggtgacggcgccgaacttgcccgcctgggccacgatctccgcttccttctcatggttcttggcgttcagcaggttgtgctggatgccctcccgggccagcaggccgctgagcagctcgttcttctcaatggacacggtacccaccagcacgggctggcccttggcgtggcagtccttgatctgctggatgaccgctcggtacttgcctgcctcggtcttgtacaccacgtcgtggtggtcgtggcgctggttgggccggttggtggggatctccacaatgtccagctcgtagatggtgccgaactcctcctgctccgtcatggcggtgccggtcatgccggacagcttgtcgtacaggcggaagtagttctggaaggtgatggtggccaaggtcttgttctcgctggccacggtgacgtgctccttagcctcgatggcctggtgcaggccgttggagtagcgccggccgaacatcagacggccggtgaactcgtccacgatgataacctcgccgtccttcaccacatagtcgatgtcccgcttcatcacgccgtgggccttgatggcctggttgatgtggtgggagagggtagcgttctccgggtcggacagattctccacgtggaagaactcctccgccttggcgatgccccgggcggtgagcatggcggtcttggccttctcatccacgatgtagtccgcgtccgcctcggcgggatcctcttcctccttgttgtccacctggacgaccgcctgcttcttcaggcgggagacgaacatctctgccatgtcatagagctgggtggacttctccccctggccggagatgatgaggggtgtccgggcctcgtcgatcaggatggagtccacctcgtccacgatggcgaaggcatgaccccgctgcaccagctccgtggagtagatgcacatgttgtcccgcagatagtcgaagcccatctcgttgttggtgccataggtgatgtccgcggcgtaagcggcctgccgctccttggtggtcaggccgtggacgatcaggcccaccttcaggcccaggaagcggtggaccttgcccatccactcactgtcgcgcttggccaggtagtcgttcaccgtgacgatgtggacgccccggccggtcagggcgttcagataggcgggcagagtggctaccagggtcttgccctcgccggtcttcatctcggcgatccggccctggtgcagcacgatgccgcccaccagctgcacccggtagggccgcatgcccagcacccggtccgcggcctcccgcacggtggcaaaagcctccggcaggatatcgtccagggtctcgccattctgcaggcgctccttgaactccgtggtcttggcccgcagggcctcgtcgctcatggccttgtattcgtcggccatggactcgatcttgtccacgatggggtagatggatttcagctcccgggagctgtaatcgccaaaaatctttttcatcagacccatgattgtgatacttcctttccgggccggtccctccggcccgccggaatggcggagcgctggagaaaggcccgttgatccatattatttataaaaggtggggcagtccccacgaaaaagcagaaatagcataccacaatcgcaggtggaatgcaaagaaaaaacaacttttgtaaaaaagttcataaatagcggcccatgtccggcagaagccatgatttttcgacaggacgcggcggggaaatcagcgaaaagaaacaaacgcttcccgaccgggcaatcgattgcccagtcataggagctccggatccagctcctcgtccagcagcatccggatgcggctgaggaccgtgccctcgccggtggaggcgtcgtagtccacgcttaccagccgggcgcccggcagcttgcgctggagggcggcgtactgccccttgccgaagatgtggcccggcaggcaggcgaagggctggacgcagagaatttttcggtatcccagccgggcccagcccacggcctcggcagcgatcagccacccatccgccaccgtcacccgcaggggagcatacccctccgcctgccgcttcagctccggcagcggcggcagggcatgatagcccgcctgattcaaaatcgacagcatatcccgctggatctccgccaggtacgacgccagcagccgatacacccgccgggcaggggcggagcctttcagggcgtggccgtccatgtagtacagggcgtaccaggtgatgccgcccacgccgatctcgcagtgctccgccgccagataccgctccaaattccagttgcccaggtggcagtatttcgtgtagatctcccccacgatagccaccttctggacttcacggggcacccgctccaccgcccggaattcggccgccatctcccggcagcggcgcaggatctcccggcgggtgagtcctcgattccccgccagatcctgtcccaggtcctccgtccagcggcgccagagtgcctccgccgtgccggggactgcctcgtatggccgggtctggttccgcagcagggccagcgtgtcccccacacggcagcggccagacagcggcggaccatggcggcggtgatgggcagcccggtgccccagtcgatgccccggacattgagactcagggtctccacccggccgtagcccagccggtccagcacccgccgcagcaggcggatgccgcaggagccccggcactcgtcccccgcctggccgaacagcaccccgcaccgggccgggtcgtaccgcccggaccgcagggcggacagcacctgccccgccaccaggaacaccggatagcacagctcattgtggaaatatttcagccccagctccgccagatggggatcgtcctccgtcagcagcaccggctcccattcctccgacgtaaaggcgtactgcagcagggggaaccaatcgtccagcagggaggggatcagcagcgtcttccgctctgccatcccggccacctccttttatcccagcataccggtccgcgcgggggaaagcaaggcaaaagtggttacaaaatccgccggaatccccgccgccccttgccccgcccgctcctttgtgttaaactgacaaaaaagccccacccgccgccgcggcggggaggagcaaaaaaggaggttcccccatgaagctcagcttttacggcgccgaccagtgcgtcaccggcagctgccactgtctggaggtcaacggcaggcgcatcctggtggactgcggattgcagcaggggcgggacgaggtgtccaacgacgcttttccctttgccgcgaacgacatcgacttcgtcctggtgacccacgcccacatcgaccacaccggccggatccccatgctggtgaagcagggcttccagggccggatcgtcgccacccggctgacggcggatctcatggacatcatgctccaggactccgcccacatccaggagtccgacgcggagtggaagaaccgcaaggcggagcggtccggcgccccccgggtggagcccctttacaccatcgaggacgcccagcgggtgagccagtacatgaccacctgcgagtacaaccagcccctggacctgtgcgagggcgtccgggtggagttcgtggacgcgggccatctgctgggctccgcctccatcctcgtcaccgccacggagggcggcatcaccaaacagatcgtcttttccggcgacatcggcaatgtggaccagcccatcatccgggaccccacctacctcaccggcgcggactacgtggtgatggagtccacctacggcgaccgcaaccacacggaggtgtggagctacaccgacgatctggcgaagatcatcgacgagaccatcgccaagggcggcaacgtggtgatcccctccttcgccgtgggccgcacccaggagctgctgtacttcatccgggagatcaaggacaaggggatggtgaagagcgacccggacttccccgtgtacatcgactcccccctggccaagaaggccaccaccatcttcaccggcgacctgcggggctatctggatgaggcggcgctggagctggtgcaggacggcacccacatgttcaacttcaccaacctgcgcatgacggagaccagcgaggagtccaagatgctgaacatggaccccacccccaaggtcatcatctccgcctccggcatgtgcgacgcgggccgcatccgccaccacctgaagcacaacctctggcggccggagtgcaccgtggtgttcgtgggctaccagggggagggcaccctgggccgcgccctgctggagggtgtgaagagcgtgaagctcttcggcgaggagatcgccgtccatgcgcagatcgtgaacttccagggtctctcctcccacgcggaccggaaccacctgctctcctggatccaggccatccaggcccccaagccccagcacgtgttcgtggtccacggggaccgggaggtggcgcccttcttcgccaagaccatccagggcctgggcttcaccgcccacgcgccccagtacacggaggtgtacgacctgatcgccgacaaggtgaccgagcccggctacctgcctgagcggaaggccaggaccaccggcggtatgcgggccagcgcggcctacgagcggctggtggccgtgggcaacatgcttatggagagcatcaagcgcagccgcgggcgggacaacaagtccctggcccggttcgcggaccagctgcggcagctgctggagaagtgggagagctaaggcagctcccttgccagagagaaggcggcctggaacgcggcctccagctccatgctgtggagctgcgccgccgcatcctcgtatttttcgacggtgttccagctgtcatccggaagcaggtcccggagccgcagggacaggcgggcggtcaggcgggagacttcccggtactccggggaggggagataggaggggaggagctcctccttggcataggcatataaaatttccattgcatccgacatagcgatcaccatagcacccattttgtacatatcattatatacacccatattgtgcgtgtcaagggatttgagagtttttatgataaaatttgcggagagactgcgcgaactgcggagagaaaagaaagtgacccagtcaaagatggccgatttcctcggtatcaagctgaggtcttaccagaactatgagggcggctctcgccggccggattacgagggactggtggccctggcggattacttcgacgtgaccacagattatctgctggggcggagcgacgtgcgggggtaacatgggatgggccgccgtccggcggccacgggggattctgctcccgcagggggctggtccagcgggatgcaccccccattgtcgtcgtcgcaaagtccgctcagctccgtttccgcctgcggcgaaaactgcgcctgctcccttgctcctcctctccccaccgcgcggggcgcggcgggggcccctttcggtcttgccaaaagagaaacgggccgtgcacggtccaaaagaaaagaccgcttagacgcgctccggcgcgttcgtgcctccgcgcgacgggggtcggcggatcggtgcaagcgccgattttggcctgccttcgggcacgctatcatcttctgcgatttctgggactgccgtcccgtggcggatggtgcggaggtcgtcggggtggttatcgcattgtctctgcttctcttttcgctgccgctggccgtcccgcgcgggaactggtgcaacgggcggatgtggacatccgcccgaaagcataaacccctacgaccacccgggtagcgcgtagcgaagcggaacgcgcggaaagaggagccggtcaaatgcgtccttgcaccccgacccaagacgcacccgcgccgcgggaatccgccatcaagcctgtaccgcaccccgccgcgcccgtcggggagccatcgcagacccgcaggcaccatctcacgccgacccccgtacagcaactttgcaccagaggtgcaaagttgcgaccaaagcgcctttttctcttacaccgggcgcggcgcgttctctttttgggtaagaccaaaaagagaatggggggcgcatctgcctagccatcagcatggctgaaattccagcgtccaatgggacgcaccccccggaggtatctatggatcgacttcatgaaaaccgcatctacaccggcacggtggaatcctactccagcgagggtttgggcatcgtccgcctggacggcgccgtggtgttcgtccctcaggccgtccggggggaaaccatcgacctgaaaatcaccaaggtgatgaagaccgccgccgcaggggagatcgtgaagatccacaagccctctcccgaccgggcccagcccgagtgccccgattacggccggtgcggcgggtgcgacttccagcacctgacgtaccccgaggagctgtgggccaagcgccagcgggtccaggacgccctgacccgcctggggggcgcagacatccgggtggaagagatcctgggggcgaagaaccccctccactaccgcaacaagagccagtaccccgtgggcgcggacggcgccatcggcttctaccgggcccggtcccatcaggtggtgccggtgaagcggtgcttgatccagcccgaggcggcggacaaaaccgccgcggcggtgggggagtggatgcggcgctacaaggttcccgcctacgacgaggccaccggaaagggactggtgcgccatgtgtacgtccgggtgaaccggaagggcgagagcctttgctgcgtggtaatcaacggcaggcaggccccccgggagccggagctggccgcctatgtctgcgccgccgtgccccacaccgcgggagtgctggtgaacagcaacacgaagcggggcaacgtgattctgggggagaagtaccgcaccctctgggggcgggactatctgatggacaccctctgcggcctggagttcaagttgtcggtgccctccttttaccaggtgaaccgagatcaggcggaagcgttgtacggcaaggccctggattatgccggcctgacggggcgggagacggtgctggacctgtactgcggcatcggcaccattacgctgtgcctggcgaagcgggccggacgggtcatcggcgcggagatcgtgccggcggccatccgggacgccaaagagaacgccgcccggaaccacattgaaaacgcggaattcttctgcggcgacgcggctgagacagccgcacggctggaggcggagggcctgcggccggacgtcatcaccgtggacccgccccggaaagggctggcgccggaggtgatcggctccatcgcggccatggggccggagcgggtggtgtatgtctcctgcgaccccgccacgctgggccgggacgtgaagcggttcggagagctgggttaccgggccgtccgggcctgtgcagtggacatgtttcccgccacacggcatgttgagagcgtggtgctgctggagaggagttgaccaaaatggcagtttcaaaattccggatttatgactactggaaagacaaagccatcacgaaaaaatttgaaatcaagccggtgtccgcgtgcacgaaggaggacgacgcactttccataacagaatttcctgatgagattttttgctgggcttgtcagatgccgccgtatcaacaggggacacatcggacactcagcggactttggaatggagacacacttttacagcggtcccatattttggaaaagtccctgaatggagaggataaacccgagaattattttctgctgtgtccgcaatgtcacgcggaatctccggatacgacggacgcgaagctctttttcgcgtgggtccggtataagcggacgcatgagaactattccatggtgcttcggagggatatgaaaaaggcggcggagattctgggagtggaccagaaccttgtggaggagcgatttgccgcgctgcggctgacccggctggaagaggatgcgtatattcgagactatattgtcaaaaactgtgcgatgcatggcagctttcttgcgccgctctcccgcatgatgatcctgcaaaaatggattctggacccggaggaacagaaaaagtttgccgcctggcggaggacgctgcctgaagaagagactggtgagaaggagccaacataaatatctcaaaagagatcattccgcaaggactgaagaataaaacagttgtcaaacacagtttgagggtgtatgataaatcacaaatcagggcggtcactgccagagaaccgaaacaggaggagtattatgaacaaaacggcaagcatggtcttgaagatcatcggcgccagcctggcattcgcagcggttatctgcctgctgatcggcggctggcatgacctcagcgtgggatacagcggtatgaagaagcggctggcccggaaattcggctccgagtacgacgactacgccgacgaagagctctacgagtaatccagagcataaaaaggaccccatccagatggatggggcccttttctgcgttttttccgccacagggcaacaaaaaacggctggaagaaatccccaaccgcaacgaaattccccttgacagaggaaaaaaaccatggtaaaataagacgcttatatgatggcagaggatattccgccattttttatcgttgagataacgatagcatatttcccagaacaatgcaagagcgggatgcaggaattttaacaacgataccgtgcgtatcattcctggccgcgccacccgaaaaaccacgcgcccggcaggacagggcggggcgcacagaagaaaggtgaatgagaagatggccaaagacaagtactacggaaagacccttcgtaagaacttcgccaggcacgaggaagtcatgcccatgcccaaccttctggagatccagaagaagtcttaccaggagtttttggacaccggcctccgggaggtgttcaacgacgtgggcgcgatcacggactatcagggcaacctggagctgaccttcatcgactacaagatggatgaggcgcccaagtacgacgtggaggagtgcaaggcccgggatgccacctacgccgcgccgctgaaggtgaaggtccgccttcggaacaaggagaccgaggagatcaaggagcaggagatcttcatgggcgacttcccgctgatgacccactccggcacctttgttatcaacggcgccgagcgcgtcgtggtttcccagatcgtccggtcccccggtgtgtactacggcaaggagacggacatcaagaccgacctgcccatcctcacctccactgtcatccccaaccggggcgcctggctggagtatgagaccgacgccaacgaggtcttctgggtccgcatcgacaagaaccgcaagctccccatcacctgcctgatccgggccctgggcctgaagacggaccaggagatcctggaccagttcggcgacgatccccgcatcgtcaccaccctggagaaggacccctgcaagaactacgaggacgccatgctggagatctaccggcgcctgcgtcccggcgagccccccacggtggaggccagcgagaccctgatccacaacctgttcttcgacccccggcgctacgacctgtccaccgtgggccggtacaagttcaacaagaagctgtccctgtggcagcgcatccccggctacaagctggtctatcccgtggcagatcctgccaccggtgagctcctgtttgatgagggccatctgctgaccaaggacgatgcccgcctgctggatacggtcggcgtgggagaggtcaccatcgacgtggagggagcgcccctgcgggtcatgtccaataagatgtgcgacctgagccattatgtggacttcgatcccctggccgagtgcggtatcaaggagcgggtgcgcttcgacgtgctgcaggagctgctgggccagtacagcggcgaggagctgaaggaccagatccgcctgcaccgggccgatctggtgcccaagcatatcatcattgatgatatcctcacctccatcaactatatgaacggcctggcccggggcatctccgtgaaggatgacatcgaccacctgggcaaccgccgcctgcgctgcgtgggcgagctgctgcagaaccagttccgcatcggcttttcccggatggagcgggtaatccgggagcgcatgaccatccaggacctggatgtggtcaccccccagagcctcatcaacatccgccccgtcactgccgccatcaaggagttcttcggctccagcccctgagccagttcatggatcagaccaaccccctggcggagctgacccacaagcggcgtctttccgccctgggccccggcggcctctcccgcgagcgtgccagcatggaggtccgcgacgtccattacagccattacggccgcatgtgccccatcgagacccctgaaggtcccaacatcggcctgatctcttatctcgccacctatgcccggatcaatgagtacggctttattgaggcgccctaccgggcggtggacaaggagaccttccacgtctccgacgagattgtctatatgaccgccgacgaggaggacaactacatcgtcggccaggctgctgagcctctggacgagaacggctgcctcatcaacgcccgtatcacggcccggcaccgggacgagatcgtggaggtggacaaggagcgggtggactacatcgatgtgtccccccggatgatggtctccatcgcgacggccatgatccccttcctgcccaacgacgacgccaaccgcgccctgatgggcgccaacatgcagcgtcaggccgtgcctctgctgcgtccccacgcgcccattgtgggcaccggcatggagcacaagatctgcatcgactctgagatcgctgtcctggcggagggcgacggcgtggtgacctctgtggacgcccgccacatcaccgtcaagtacgacagcggcgaggtcaaggactacaagctgaccaagttcctccggtccaaccacggcacctgcatcaaccagcggcccatcgtggaggtgggcgagcgggttcacggctggggcaccgacgagaacggccagaccgtggatcccaccgtcctggcggacggccccgccactgagcagggcgagatcgccctgggccagaacatcctggttggcttcatgacctgggagggctacaactacgaggacgccgtgctgctgaacgagcgtctggtgcgggaggacctgtatacctccatccacatcgaagagtacgagatcgacgcccgggacaccaagctgggcccggaggagatcacaagagacatccccaatgtgggcgaggacgccctgaaggatctggacgagaacggcatcatccgcatcggcgcagaggtccgttccggcgacatcctggtgggcaaggtcacgcccaagggcgagaccgacctcaccgccgaggagcggctgctgcgggccatcttcggtgagaaggcccgggaggtccgggacacctctctgaaggtcccccacggcgagagcggcatcatcgtggacgccaaggtcttcacccgggagaacggcgacgagctggggcccggcgtgaacatggtagtgcgggtgtatatcgcccagcgccggaagatccaggtgggcgacaagatggcaggccgccacggcaacaagggtgtcgtgtcccgggtcctgccgcaggaggatatgcccttcctgcccgacggcacgccgctggacatcgtgctgaaccccctgggcgtgcccagccgtatgaacatcggccaggtgctggaggtccatctgggctacgccgcccagaagctgggctggaaggtggccacccccatcttcgacggcgcgtcttacagcgacattcaggagctgctgcagcaggcgggcctggatcctgagggcaagagcgtgctgtacgatggccgcaccggtgagcccttcgacaacaaggtcaccgtgggctacgtgtacttcctgaaactgcaccatctggtggacgacaagatccacgcccgctccaccggcccgtactccctggttactcagcagccgctgggcggcaaggcccagttcggcggccagcgcttcggcgaaatggaagtctgggccctggaggcctatggcgcggcctataccctgcaggagatcctgacggtgaagtctgacgacgtcaccggccgcgtccggacctacgaggccatcgtcaagggccacaacgtgccccagcccggtgtgccggagtccttcaaggtgctggtgaaggagctgcagtccctgtgcctggacattcaggtgctggacaaggacggcaacgtcatcgaactgaaggaagacgaggacgctatggacaccttcaacctggcccggatggacgccgacgatgaccggcaccgcgccttctccgaagaggcggagttccaggattccggctttgacatcgaggacgccccggaggatgccggcgcggacatcgacgtggacttcgacgacgaatgatccaggatcgtattgttcgtcaactcaacaattctggatcatgtaaggaggaaatcgcaagatgatcgacaacaacactggcaacaacattgcctttgacgcgattaagatcggcatggcctctccggagcagatccgcgcctggtcctatggcgaggtgaaaaagccggagaccatcaactaccgcaccctgaagccggagcgggacggcctgttctgcgagcgcatcttcggacccaccaaggactgggagtgccactgcggcaagtacaagaagatccgctacaagggcaagatctgcgaccgctgcggcgtcgaagtcacccgggccaaggtccgccgggagcgcatgggccacatcgagctggccacccccgtctcccacatctggtatttcaagggcatcccctcccggatgggtctgctgctggacatcagcccccggatcctggaaaaggtgctgtatttcgccaactatatcgtcaccgaccccggtgagactccgctgaccaagaatcagatcctctccgagaaggagtaccgggattaccgtgagaagtatgaggacgacttccaggccggcatgggcgccgaagccgtgaagaagctgctccaggacgtggacctggaggccctctccgcccagctccacgcagagctgaaggatgcctccggccagaagaaggcccggatcgtcaagcggctggaggtggtggacgccttccgtctgtccggcaacaagccggagtggatggtcatcgacgtgctgcctgttatcccgccggagctgcgccccatggtgcagctggacggcggccggttcgccacgtccgacctgaacgacctgtaccgccgggtcatcaaccggaacaaccgactgaagcggctgatccagctgaacgccccagatatcatcgtccgcaatgagaagcggatgctccaggaggctgtggacgccctgatcgacaacggccgccggggccgcgccgtcaccggcgccaacaaccgggcgctgaagtccctcagcgatctgttaaagggcaagcaggggcggttccgccagaacctgctgggcaagcgcgtggactactccggccgttccgttatcgtggtcggccccgagctgaaaatctatcagtgcggcgtgcccaaggagatggccgtggagctgttccgtcccttcatcatgaaaaagctggtggaggacggcactgccaacaacatcaagtccgccaagaagatggtggacaagggcgtcaccgaggtgtgggacgctctggatgtcatcatcaaggaccaccccgtcatgctgaaccgcgctccgacgctgcaccgtctgggcatccaggccttcgagccggtgctggtggacggccgggccttgaagctgcaccccctgaactgcaccgccttcaacgcggacttcgacggcgaccagatggccattcacgtgcccctgtcggccgaggcccaggcggaggcccgcatcctgatgctctccgccaacaacctgctgcgtccccaggacggcggccctgtcaccgtgcctacccaggacatggtgctgggctcctactacctgaccatggaccgcatgggcaaggcggagaagggcgccgagaccatctggtgcgaggatgccggcgacaccaacctcaccgctcactccatcgtggacgcggatgactttgtggccgccaacgacgccctggagaaggggcagaagaaggccgcctaccgccctctccacttctacgccagcgaggaagaggccctcatggcctacaacgaccatgtgattgggccccactgccccatcggcgtgcgccgcaccatgaccgtggacggcgtcagccacaccgctgtggtagagtccacccccggccgtatcatcttcaaccagaacatccctcaggacctgggctttgtggaccggaccgatcccgcccacgtctgcgactatgaggtgaccttcacctgcggcaagaagcagctgggccagatcgtagaccgcaccatcaacaagcacggcttcaccgtggccgctgaggtgctggacgccatcaaggccaccggctacaagcactccaccctggcggccatcacggtctccatcgcggatatgaccgtgccccccaagaagtacgagctggtggcggcctccgagcagaaggtgctggacattgagaaccagtacaagatgggcttcatgaccgagcacgagcgctacaagcaggtggtgcaggtgtgggagaagaccaccaacgatgtctctgacgccctgcagaagaacctggaccgctataaccccattttcatgatggcggactccggcgcccgcggttctatgaagcagatccgccagctggctggtatgcgtggcctgatcgccaacaccgccggccgcaccatcgagatccccatcaaggcgaactaccgcgagggcctgaccgccctggagtacttcatctcctccagaggcgcccggaagggcctggccgacacggctctgcgtaccgcagactccggttacctgacccgccgcatggtggacgtctcccaggatgtcatcatccgggaggaggactgccacgtgacccacggcatcaaggtctccgagatcagcgagaacggccaggtgatcgagaagttctccgaccggctccggggccgtttcctggtgggcgatgtggtggacgccgataccggcgaggtgctgctgtccagcaccaagatgatggacgagaacgacgccaagatcctggagacccacaagtgggtccaggccaactaccgcgacggcgaccgctgcaccttcgacccggcggttgacgagcaccccaccgtcatgatccgcaccgtgctgacctgcaaggcccacagcggcgtgtgcgccaagtgctacggcatgaacctggccacccagcagcctgtgggtccgggcgaggcggtcggcatcattgccgcccagtccatcggcgaacccggcacccagctgaccatgcgtaccttccacaccggcggtctggccggcggcgacatcacccagggtcttccccgtgtcgaggaactgtttgaggcccgtaagcccaagcggatggctactctggcagagatcggcggcacggtcaagttcgaagagaccagcaagggcagcctggtgaacatcgtcatcaccgcacctgacggggacacccgcacctacgcggtgcctcacaccggcctgctggtgaaggacggcgacgtgatcgaggccggccaccagctgacctacggtgcgttgaatccccacgaggtgctgcgcatccgcggcgctgacgccgtgtacaactacctgatccaagaggtcctgcgggtgtaccgccagcagggagtggatatcaacgataagcatatcgagatcatcgtccgccagatgatgcgcaaggtccgtctggaggacgccggcgacaccaagctgctggacggctctatggtggacgtcctggagctggacgacgccaacgaggagatcgaccgccgcaacgccgccggtgagcggcaggagaacggcgagcctctgcgccacgccgtaggcacccagctgctgatgggcatcacgaaggcatctctcgccacggactccttcctgtccgccgcctccttccaggagaccaccaaggtcctgacggaggccgccatcaagggcaaggccgaccatctggtgggcctgaaggagaatgtcatcatcggcaagctgatccctgccggcacgggcctgacggcctaccacacctttgctgaggagttggttcccggcccggcgcctgttgaggccgccccggagcccattcccgcagagctgtgattcgccggacatcccgcagacacaagaccgggagagagcctgaccgcttgcggtcaggctctcttttcagatgccgggcatcgggaggcggggtgaaggagacgccccgcagcccggggctgaaacggttctgctgagaagcggatgaccaacgcccccctttatttaaaatatcaaagctcccttgttcccaggcgcactgcgccgtatccggacggcggccagaaacggcccggaaacagggagaagttctcctaagatgtctccaggtatccggcacgcccgggagatggggaaaacgtccaaaagtctgcggatcatggaaaatttttaccgaaaaatgtcttgacggatatgtttccccatggtataatccaaaaatgcgcggatattaggattctgcggattttgccatgcgtttcaggaggaatttcccgtgatctcggagcttgcttcccaggagaaggtcatcggcgtgaagcagtcccgcaaggcgatccgggaaggccgggccaagcgggtctatctcgcctgtgacgccgatcccgccatcaccgagccggtggccgccagctgtgcggaggccggcatccccgtagagacggactacacactgtcccagctgggccaggcgtgccggatcagcgtgggcgcgtccgtggtggccgtcctctccgcataaagaaatggtttttttcggaatagcttcaccgcgttccgtaaaaaataagggctgtcgtggttacacggcagcgaaattatgaaagaaaggagaaatacaccgaatgcctacttttaaccagctggtccgtaaaggaagagaacaggctacctacaagtccacttctcccgctctgcagtttggtctgaacaccctgaagaacaagaccaccgatctgccttctccccagaagagaggcgtgtgcaccgccgtgagaaccgcgacccccaagaagcccaactccgccctgcgtaagatcgcccgtgtgcgtctgaccaacggctacgaagtcaccgcttacattcccggcgtgggccactccctgcaggagcactccgtcgtgatgatccgcggtggccgtgtcaaggatctccccggtgtccgttaccacatcatccgcggtacgctggatacccagggcgtctccggccgtatgcaggctcgttccaaatacggtgccaagcggcccaagcagaagtaagtctgcgaactgagagctttgccgaataggtttatatagatggcggcctccgggccgccgggacgacctctttggcaggcatccacggaaggctgcaatacgccttttgagtacctatgagatcatagaattattatgaaggagggaagcatagtgcccagaagaggtaatgttcccaagagagagatcctgccggatcccgtttacggctccgtcctggtcacccggctgatcaatagtgtcatgctggatggcaagaagggcgtggcccagaaggtggtctacggtgccttcgaccagatcaaggagaagaccgagaaagaccccatcgaagtgttcaaccaggccatggagaatatcatgcccagcctggaagtcaaggcccgccgtgtgggcggcgccacctatcaggtccccatggaggtccgtcccgcccgccgcacgaccctgggtctgcgctggctgacggcctacgcccgttcccgcagcgagcgtaccatggctgagcgcctggccggcgaactcatggacgccgccaacaacaccggcagcgccgtgaagaagcgcgaggaagtccacaaggcagccgaggccaacaaggcgttcgcccatttccgctggtaagttaggagaaacagtatgccgagaaaaacacctcttgaaaatacccgtaatatcggcattatggctcacatcgatgcaggcaagacgacgactaccgagcgtatcctgttctacaccggcgtgaactataagatcggtgagacccatgatggcaccgccaccatggactggatggcccaggagcaggagcgcggcatcaccatcacgtccgccgccaccacctgctactggtccggttccaagaaccagttcaagcccacccggattaacatcatcgacactccgggccacgtggacttcaccgtggaggtggagcgctccctgcgcgtgctggacggctctgtcaccgtgctgtgcgccaagggcggcgtggagccccagtctgagactgtgtggcgccaggccgataactacaaggtccccggatgatctatgtcaacaagatggacatcatgggcgccgacttctacaacgtgctccgcatgattgaggagcgcctgaagtgcaacgccgtgcccatccagctccccatcggcagcgaggatacctttaaaggcatcatcgacctgatcgagatggacgcggacatctactatgacgatctgggcaaggatatgcgcgtggagcccatccccgcggacatggtggacctggcaaacgagtaccgggagaagctgatggacgccgtgtccatggtggacgagtctatcatggaggcatatctggctggcgaggaagttcccacggccaagatccgtgcggccatccgcaaggccacgatcgccaatgagatggtgcccgtcacctgcggcacgtcttaccgcaacaagggcgtgcagaagctgctggatgccatcgtggactatatgccctctcccctggacattccgcccatcaagggcgtgaaccccaagactgatgaggaggacgagcgtcctgcggacgacaacgcccccttctccgccctggcgttcaagatcatgaccgacccctatgtgggccgcctgagcttcttccgcgtctattccggccatctgaccaccggttcctccgtgctgaacagcaccaagaacgtcaaggagcgtatcggccggattctgcagatgcacgccaaccaccgggaggatatcgaggaggtcttctccggcgatatcgaggctgccgtgggtctgaagaacaccaccaccggcgacaccctgtgcgatgaaaaggcacccatcatcctggagtccatggagttccccgagcccgtcatccgcgtggccatcgagcccaagaccaaggccggccaggagaagatgaccatgggcctcatcaagctggccgaggaggatcccaccttcaagacctacacggatgaggagaccggccagaccatcatcgccggcatgggcgagctgcacctggagatcatcgtggaccgcctgctgcgcgagttcaaggtggaggccaacgtgggcgcacctcaggtcgcctacaaggagaccatcaagaaggccgtggaccaggacaccaagtatgcccgtcagtccggcggcaagggccagtacggccatgtcaagatccacgtggagcccaacgagtccggcaagggctacgagtttgtcaacgccatcgtgggcggcgccgttcccaaggagtatatcccggctgtcgacgccggtatccagggcgccatgaacgccggcgtggtggccggcttccccgtggtggatgtgaaggtcaccctgtacgacggctcctatcatgaggtggactcctctgaaatggcgttcaagatcgctggctccatggccttcaaggaggcctgccgcaaggccgatcccacgctgctggagcccatcatgaaggtcagtgtcatcgtgcccgatgagtatatgggcgatgtcatcggcgacctgaacagccgccgcggccagatcatccagctggaggcccgtcccggcgcccagcagatcgacgcctacgtgcccctggccgagatgttcggctatgccaccgatctgcgctcccgcacccagggccgcggccagtacaccatggagcccagccactacgtggagatcccgaagaatatccgggataagatcgtggagacccgcaataagccccaggcgtaaggaaaaagggattgattttccctccattatacggtaaaataagcaatgctgagaaaaaccgcattgcacccaacagattttgaaaattgacaggaggattttcaaatggctaagcagaaatttgaaagaaccaagccccatgttaacatcggcaccattggtcacgtcgaccatggcaagaccacgctgactgccgccattaccaagtggctgtctctgcagggcaaggctcagttcgaggcttatgactccatcgacaaggcccccgaggagaaggagcgcggcattaccatcaacaccgctcacgtggagtatgagaccgagaagcgtcactatgcccacgtggactgcccgggccacgccgactatatcaagaacatgattaccggcgctgcccagatggacggtgctatcctggttatcgccgcttccgacggccccatggctcagactcgtgagcacatcctgctggcccgtcaggtgggcgtgcccgccatcgtcgtgttcctgaacaagtgcgatcaggtcgacgaccccgagctgctggagctggtggagatggaggtccgtgagctgctctccaagtatgagttccccggcgacgacatccccatcatcaagggttccgctctgaacgctctgatttccgagtccagcgatcccgccgctcccgagtatgcctgcatcaaggagctgatggatgctgttgacgactatatccccacccccgaccgcaaggaggatatgcctttcctgatgcccgtcgaggacgtgttcaccatctccggccgcggcaccgtggctaccggccgtgtggagcgtggtgtcctgaagctgagcgaggaagtcgagattgttggcctgaccgacgagaagaagaagaccgtcgtcaccggcatcgagatgttccacaagctgctggactacgctgaggccggcgacaacatcggcgccctgctgcgtggcgtggaccgcaacggcatcgagcgcggccaggttctggcgaagcccggttccattcatccccacaccaagttcaagggccaggtttacgtcctgaccaaggacgagggcggccgtcacacccccttcttcaacaactatcgtcctcagttctacttccgcaccaccgacgtgaccggcgtcatcaccctgcccgagggcactgagatgtgcatgcccggcgataacgtcgagatgagcgtggagctgattacccccatcgccattgagaagggcctgcgtttcgctatccgtgagggtggccgcactgtgggttccggcgctgttaccgagatcaccgaggcctgatttttcagccaagaaaaagaactgccgcaatgcggcagttctttttttgcccgcaggccattccgaacgggctcagtcctgctccggatagaccagtgtgtcctggaatccgtctgccccggcgcagaggatatccccggccaccggctgcccctcgcagacgtagaggttggcctggacaccctccggccgtccgggatagttggtgacggtgtaggtgtaccgggccacttgcttgccgcagcacgcagaaaggtcgaagccctgggaatcctgcagctcgttgtaggtgaggtagggctcctccagtttctccggcagcagaaactgcagcgtctccaccggttcctcctccacctgccagcccatggactccagataggcgatgcggtcggcattgccggtcagctgccaagctgccgcgtcctgaccgccaccggagcggcccaccagcagcaggacggcggccgccaggatgccggccaggatcacagccacaacggcctttgtcttcttggaaacccgcgcggtccaaatcagcatatcgatccctcctgcatcttcctattcatttttttccggatttatgataagatgaagcagaacaagccgtcggaagagagtctgccgtgttcgtcccgggggaagagaagcggtaaaaagaggcagaggtcagcaaggaggaggccggcatggagaaagcgcgtctggacaagatcatcgccggggaggggacatactcccggcgggaagtgaggctcctggtccgccagggccgggtgctggtgaacggtgtgcctgcccggtctccggaggacaaggtggtgccggaggcagtggagattatggtggacgggaccgtgctgcactgccgccgctacacctggatcatgcttcataagcctgcgggggtcctctccgccacggaggacggccggggggccacagtgctggacttgctgccgccggagctccggcggcggggactgtttccggtggggcggctggacaaggatacggagggattgctgctgctgaccaacgaaggaggactggcccacgacatcctctctcccaagcatcatgtggacaaggtctactatgcccgcactgccggctgtctgacggaggaggactgcagggcgtttgcggcaggcatgaccctgggaggcggcctggaatgcctgccggcggggctggagatcctctccgccgggccggagggcagcgaggggctggtcaccctgcgggaggggaagttccatcaggtgaagcggatgctggcggctcggggaaagccggtcctctatctgaagcgggtccgcatgggcaatttgccactagatccggccctggaacccggcacataccgatatttgacggaggatgaggtagagagcctgcgaaatttctaacggccacatcagaaaattcaaatcttgcccaaaaaagaagccgtttttttgttgaaaaaagaaaatatatcttgcattttgacaaattcaacgatataatatatccattgacaatttgcacaacgcccccacgtgtgattttagaggaggaggacgaccatgtctggaagaatttttcaaaatgtggtgctgcagctgaaggaaaatacggaccggacggttggcgtcattgacggtgagggcatcgtcatcgcctgcagcgaactggcgatgatcggccagcggtgggcggagcatgtgcctgccatcaatgctgccggcggcgccatcgtcacgtcggagggaaagacattcaaggccctgaacggctggggaacccagtttgactatgcagccttcgcctttggcgacaacgagatcagcaagaccgtttgcgccatggccacggtggcgctgaatgcagccaaatcctactacgaggagaaacatgaccgggggtccttcatcaaggacatcatctccgataacatcatgctgggggatatctatgtgcgggccaaggagctgcgggtcacagcggacgtgccccggggcgtattcgtggtccgcaccctgaagaaggggagtctgtccccacggacgtgatccagtccctgttcccggaccggcaaaacgatttcgtcctcagcatcggcgagggcgacgtggtcctcatccgccagatgccggagggctccggcatcaaggagctgaacaagatcgcctcctctattgaggaggccctccgcgccggcggggagcccacggtggtggtgggcatcggcaccgtggccacccacctgcgggacttggccaagagctataaggaggcacagatcgccattgaggtgggcaaggtctttgacacggagaagtacgtcatcaactatgagaatttgggcatcggccggttgatctatcagctgcccaccaccctgtgcgagatgttcctccaggaggtgttcaaaaagaaccccatcgacgcactggacaaggagacgctcttcaccatccacaagttctttgagaacaacctgaacgtgtccgagaccgcccggaagctgttcgtccaccggaacactctggtgtaccggctggagaagatcaagaagctgacgggcctggacctgcgggagttcgacgacgccattaccttcaaggtggctctgatggtcaagaaatatctgacctcccggggcatcgactcctgagcctggatggatcacacaagcgccccggccggaattccggccggggtttttcgcgcccggcggagacggaccgccggggaggaaaacggaatcggaagatttgaaaaaggcggttgcattgcggcggaaaaccagatataatgaaaaaagctcttacattatgtcgactggcggggaacctttcggccgcgcccggcgtgtataaaatagggaacacgaggtacagacatgattcgattaaaagacgtggagatggagtacgacaacggcacccgggccatcaagggcattaccctgacgatcgaggacggggaattcgtgtttctggtgggcccttcggggtccggcaagtccaccatcatcaagctgctgaccggcgaggtggaaccctgcgccggacgcattatgatcaacggtttttccgtcagcaacatctcagaaaagcagatccccctgatgcgccgcactctgggagtgatttttcaggatttccggctgatcgagaagaagactgtctatgacaacctggcctttgtcatgcgggcagtgggcgccagccccaaggagatccgcaagcgcatcccctatgtgctggagctggtgggcctggggaaaaaggcggacagctatcccacggagctctccggcggcgagcagcagcgggtagccattgcccgggccctggtgaacaaccccaacaccatcatcgccgacgagcccaccggaaacctggacccggagcggtccctggagctgatgagcctgctggtgaagatcaacgagctgggcaccaccgtggtggtggtgacccacgagaaggacctggtggaccgcttcggcaagcgggtggtcaccatcgattccggccatgtcgtcaacgacagcgtgggcggctatgtggggggcatatccatggctaaacgtcacgatttcagctattttttccacgagggactgagcaatatgttcagccacggcttcatgtcctttgccgccatcggcatcacggtggcctgcctgctgattatgggtacctttaccctggtggcggtaaacgccaatgagctgctgaccaccctggaacaggagaatgagatcctggcctatgtggatgacagctacaccgagacccaggcccgggccctcaagtcccggctggaggccattcccaatgtggcctccgtcaccttcatttccagggatgaggccatggaggacttcaaggcccagtacccggatgaggagctgttccaggacctggacccggagattctggaggaccgctacgccatcaagctggtggatctggaggcgcagagcgagaccgtggaggcggtgcaggccctcaccggcatctccgatgtcagccactacgaggagatcgccggtggttttgtcactgtgcggaacgtagccacggtggtatgcgtggcactgatcgccatcttgttcgtagtgtcggtgttcatcatctccaacaccatcaagctcaccacctttgaccggcgggaggagatcgccatcatgcggatggtgggcgccaccaacggcttcatccgctggccctttgtgtatgagggcttcatgctgggcctgctgggcgcggtgatcgccttcttcctccagtgggcgctgtatgcggcagtggcccggggtgtggatagcaacgacacgctgcagctgatccaggtgatgcccttctcggagctctgggcgccagtggcggcggtgttcgctctagcgggcattgtgatcggcgtgggaggcagcctctccgctatccggaaatttttgcaggtgtgaggtgacgggcatgaagaaagctggcaggcgattccaccgcatcttccgcgccgtgttcgtagcggcgctggccttggctatcaccggcgccaatctggctccggcggcggccgtcacctgggcggacgtgaatgaattgaaggatgaggccaacggcctggacgcggagaaaaaggagctccaggccaagctggatgccctggcggacgacaagagccaggctgtggcccggaaagagctgctggaccagcagatcgccaatacggaggcacagatcgccaatacgcaggcccagatcgaccggtatgccgccctcatcacccagacggaggcggagctggtagaggctgaggaaaaagaggcggcccagtacgagctgttctgcagccgggtccgagagatggagaagcaggacgaggtcagctactgggcggtgctgttccgggccagcagctttaccgacctgttgggccggctggacgccatcaacgagatcatgaagtacgaccagggcgtcatcgacgacctcaaggcccttcaggcggagatcgaggagaagaaggccacgctggagagcagcaaggctgagaccgaggctgccaaggcggagctggtcagcaaggagaatgagctgaacacccagcgcagccaggccaacgccgtcatccagcagctgtccgccaacgagaacgagacggaggccgcactggcagatctggaggcggagcaggacgccctgtgggcggaggcccagcgcctcagcgaccagctggtggcccagcaggccgccaacggccagtccacagagtccaatccaggcggctacatctggccggtgaacagccggtacatcacctccaccatgggcggacggaactctcccggcggtatcggctccaccaaccacaagggtacggacatcggccgggtgggttacaccagctccatctacgcagccaagtccggcacggtcatcgtgtcccagtacagcagctcctacggcaactatgtggtcatctcccacggcagcggcaataccacactgtatgcccacatgtccagccggaaggtgtctgtgggccagtatgtgaaccagggagacgtgatcggcatcaccggctccaccggcaactccaccggaccgcacctgcactttgaggtgacggagaacggcgtccgggtgaatccactgaacgacggcgcagagcccaagatgggatatctcaccggctataccctttcaaaaagtgcataaacaccgctcccgccccgtaggatggggcgggagtgattttatgatcggtatgatgacttggacgccccctgcgggcggcgtccggcaaaagagcgtggttctggagacgcgggccctgctccacctgcgggtggcctgggcgtcggtggccaggggcccccggacaccggaggccctggtgcggcggcgggtgctgacggccgccaagcggctgcggaaggccggtgtcacccgtctggtggtgccggaggcgtttgcctatggggaacagctggagaaggtcggtgtggcgccggtgtccacgctgcctctgcggcgggcgctggcggcggatctggcacgggcggtcatggcagggcggaacctctccggcggcagcgcacggctggcggtggcgggagaccagctctccggcgagctggtgcggaccgtgacggagctggcgctgggaaaccgttacgtgctgctggatgtgccctacggcggcgacaccctggccaatcagctgcggcgggagtacggcgtttccctgctgctgtcccccacccggcagcagatggaagaggcggatgtgctggtgctgttcgcggcccggacggacctgcgacggcgggacccggcagtgctgcggctgtatgatgaggcggcgcctctgccgccgctgctgctgccgccggtgctggagggccagatgcccccgggcctctgccgccctcagctgctggccgtactggtggagagcggcgtcctgcggccggggcagatcaccgtgggcacggcggagagctgacaccgcagagaattttgcaaaaccgcaggcggcatcgcttgacattctcaaatccacacactataatactactctatgataatatagcatcattatgtgcaggggcggccgcatcggccgccctgccaaaggataggagagatacggtccacatggaaagagagtacaagatgagcgcggcccgcgcccaggaactgcaggaagagctgaactatttgaagaccacccggtctgacgaggtggcggagcagatcaaggtggcccggggcttcggcgatttgagcgagaacagcgagtacgacgaggcaaagaacgagcagggcaagctgtattcccgcatcgcagagctggaggagatcctgcagcacgtggtgatcgtggacgagagcaacgcccccaccaacgtggtgaccatcggctgcaaggtgacggtggcggacaagaacggcaacaccatgcccgcctaccgcatcgtgggctctcaggagtccgaccccatgaacggcatcatttccgaggagtctcccttcggcaaggccctggtcggagccaaggagggggacaccgttacggtggaggcccccagcggcgccatcgtctacacggtgcagaagatcgagcggtaaaggagagcggacatgtctgaacagaagacaacccagcagccggagcaggagctgagtgagcagcgccgcgtccggcgggagaagctggcggcccttcaggccgcaggcgaggatcccttccagcagacccggttcgactgggacgccacctctgcacagatcaaggagcactttgaccagatggagggcagggccgtgaaggtggccggccgcctgatgagcaagcggggcatgggcaaggtcagcttctgtgacctgcaggaccgggacggccgcatccagctgtacgcccgccaggacgagatggatgaggcggtctataagaagttcaagaagttcgacatcggtgacatcgtgggcgtcgagggtgaggtgttccgcacccagcggggcgagatgagtgtccgggccaagaacatcacgctgttgagcaaggcgctgctgcccctgccggagaagttccacggcctgacagatctggagctccggtaccgccagcggtatgtggatttgatcgtgaacccggaggtgaagcgaaacttcgtcatccggtccaagttcatcaagcacgtccgggacttcctggatgaacggggctatatggaggtagagacgccggtgctgaacaccatttccggcggcgccactgcccggcccttcatcacccaccacaacactctggacatcgatatgtatatgcgtatcgccacagagctgcccctgaagcggctgattgtgggcggcctggaccgggtgtatgagatcggccgcatcttccgcaacgagggtatggaccccaagcacaacccggagtttaccactgtggagctgtatcaggcctacacggacttcaacggcatgatggatctgtttgaggacctgctgtcctctgccgcccagaagatcctgggcacctatcaggtggagtggcagggcgagcagatcgacctgacccccggctggccccggctgaccatgcatgaggccgtgaaacagtacaccggcatcgacttcatggctatctcatctgatgaggaggcggtggccgctgccaaggccatcggcgtggagctgccggagacggcggaccccacctggggcaatgccctgtatgagaccttcgatcagaaggtggaggagaagctggtacagcccaccttcatcactatgcacccagtggatgtgagccctctggccaagcgttccccgcaggatccccggctgacggagcggttcgagctgttcatctgccgcagcgagatgggcaacgccttctccgagctgaatgaccctatcgaccagaagcagcggttccagaagcaggtggagctgcgggccaagggcgacagcgaggctggcatgatggacgaggactatatcaacgccctggagtacggcctgccccccaccggcggccttggaatcggcatcgaccgctgcgtcatgctgctgaccaactccgacaccattcgggaagtcattctcttccccacgatgaagccgctggaatgagcgcatccggccggagagcctgtgctggcaaacgtccggctaaggccggatttgcggagagctgcaaatggagaagttgacccggcggggcctttgccccggcggaaagagggggagtacgccgctggccggcgtactcctccgtctgctgtcaaggcaaaaaccgccggcagaaaaacggaatcctctccggatatgcgcaccggctctggatttagagcggaatgtgtacggcaccggggcggtcgaacagtggacttgagaagcagaggcacctgcgccgcagggggaggagagagattccggaggcgataaatgggagagcacgaaggcggcacccttccggagaaggccggatccggagctcccacctgggctccgggctgttgaatctgtaacggccgggctgcagcggccggtgtttttttatttataaggtatgaaattccagggtgctgtgaaaaaaatcgttgacttgaatcacagaagagcttatgctatacttgcttttgtataaatccccacagcggtttccatgaaattccatggactgcggcggccaagggctgccgaatgggacctttcgcgctctatgtcccaccgggcatagagcgcatccccgtctccggacagcacctggaacggatggacgcacggggagcagaatgaccggaaaaggaggcgcgccctatggagatcatcaccagccggaccaatccgctgtgcacccatctccgcaagctggcgtcctccgtttcttatcgccgggactgcggggagttcctttgcgacagccccaagttgctggaggaggctttgctgtggagagcgggcctgcggacagtggtctgcacggaccccgccgccctgcctgccctgcccgatactgtccgccgcgtccaggtacccggggatttgatgaaatccatctctcccgcacagacgccccagggcgtcctctccgtgtgcggcctgccgggccggacgcttccggaacagttgaccggccgccggtacgtggtcctggacggggttcaggatccggggaatgtgggaacgatcctccggacggcggacgcctttcacgccgacggattgtttttggtgaacgcctgcgcggacctatacaatcccaagaccgttcgggcctccatgggtgcggtgttccgctgcccggtgtggacctgcgggctggaagagctgcgggcgctgctgacgaagagcggcctgcccttgtatggcgcggcccttcggagcgatacggtggacgtgcggcgggcggacttctctcactgcgccgtggccgttggcagcgaggggaagggcctctcggcggacgcgctggcggcttgtgacctgacggtgaggatcccgatgagcggtcactgcgagtccctgaacgctgctgctgcggcggccgtgctgctgtgggaggcggcgagagacgactgaggagggaagtccatgtccgcgctgaaatactggctgtggctgacggagctgccggggctgacgaaccagacccggctggcgctgctgcagcatttccccacgccggaggacgtgtactacgcggaggcggaggaggtgctgctgaccgagggcatcacccgggagcaggcgatcctgctggagaacaaggactgcgccgctgcggaccggattttggcggactgccagcggctgaatgtgaacatcctcaccctccaggacgcggggtatcccaaccggctgcggaatatttacgacccgccctgtctgctgtatgtccggggccgcctgccggcttttgacgatgaggcggcggtggctgtggtgggcaccagggactgcacgccctacggcgtctcctgtgcggagaagctgggccatggcttggccgccggcggagccgtggtggtcagcggcttggcccgaggcatcgactccgcggcgctgcggggcgccctgcgggccggcggcacggtggcggcggtgctgggcaacggcacggatgtgatttacccaccggaaaatcaatacctatatgaggatgttgcggcggctggcgcgctggtcagcgagtacccgccgggcacgccgccggatggacggcatttcccggtgcgcaaccgcatcctatccggcctctctctggcagccctggtggtggaggcgccggagcgcagcggtgcgctcatcacggcgggcaccgccctggagcaggggcgggacgtgttcgctgtccccggacccattgatgctccggccagcgtgggctgcaaccgcctgatccgcgacggcgccgggctggcgtccgacgcctgggacatcctgcgggaatacgaggcccggttcccggacaagctgcgccgggaggggacgcaggacgcgccccctgtgctgggctatcaggcccgacagaagacggagcccaagccggtggctccgtcggtgagcctgtcccacaataatctgagtctgaccgacgaccagatctgcctgctccggacgctgacggaggagcccatgctggcagacgacctgatcgagctgacgggcatccccactcggcgggtgctgtcggccctgaccgtgctggagatcgagcatctggtgacacagcacagcgggaagcggtacgcccgcgcggtgaatttgacggaataaacacgcgcccgatcctgggcgcttggaggtaactatggcaaaacacagcctggtcatcgtggagtctcccgcgaaggccaaaaccatcggaaaatacctgggcaaggagtttgaggtgaaggcctgcatgggccatctgcgggacctgcccaagagcaccctgggcgtggacctggagcacgactttgagccggtctacaagcccatcaagggcaaggaggacatcatcgccgacctgaagaagtccgccaagagtgcggagatggtctaccttgccaccgacccggaccgggagggagaggccatctcctggcacctgaagcagctgctgaacctgccggacgagaagacccggcgggtcacctttaatgagattaccaagaacgtggtgcaggagagcatccgggagccccgggacatcgaccagaagctggtggacgcccagcaggcccgccgcatcctggaccggatcgtgggctatgagctgagccccctgctgtggaagaagatccgccggggcctctccgccgggcgggtccagtccgtggccacccgcatggtggacgaccgggaccgggagatcgaggagttcaaacctgaggagtactggaccttggatgccaacctgttcggcgacgacgcgaaaaagctccccttcgccgcccgctaccacgggaaggacggcaagaaggcggagctgaagtcggcggaggacgtggatgctgtggtccatgagacggagcacgcccccttcaccgtcaagaccgtgaagcgcacagacaagcagcgcagcccctctccgcccttcaccacctccaccatgcagcaggaggcgtcccgcaagctctccatgacgccccggcggaccatggccatcgcccagcagctgtacgagggcgtggatatcgagggcgagggcaccgtgggcctcatcacctatatgcgtaccgactccctgcggatcagtgaggaggccctggcctccgccaagaccttcattacgggccgctacggcgaacattacgcccagacccaccgctacaaggccaaggcgggcgcccaggacgcccacgaggccatccgccccagcaacgtcaactggacgccggagcagctgaaaaaggacctgaccggcgagcagtaccgcctctaccgcttggtgtggagccggttcgtggccagccagatggccaacgccgtgtacgacagcgtggccgtggaggtcgaggcggcgggacacagcttccgggccagctcctccagcctgaaattctccggctacaccgccgtgtatgaggagggcaaggacgaggagaaagaggagaaggaatcccccttgcccgccctgcgggagggcgaacctctgaccctgaaggactttgaccgggagcagcacttcacccagcccccggcccactatacagacgccacgctgatccgggccatggaggagcagggcatcggccgcccctccacttacgctcccactgtgtccaccatcctggaccgggagtacgtggtgaaggagggcaagtacctccgcatcaccaacctgggccgtgtggtgaccgccctgatgaaagagcggttctccgacatcgcggatctgaaattcaccgccaatatggaacagcggctggactccgtggaggagggaaagaccgcctggaaggacgtgctgcgggagttctacggggactttgagcaggacctggagaacgccgaaaaggctctggacggcgcccgcatcaaggtgcccgacgaggtcagcgaggagatctgcccggagtgcgggcggaatctggtggtaaagtccggccggttcggccgcttcctggcctgtcccggctaccccgagtgcacgttcaccatgccgctggtggtggagatgccgggccgctgccccaagtgcggcgggcggctgatgaagcgcaccggcaacagcaagaagaccggtaagcagtatacctactactgctgtgagcatgtgaacagcaaggacgagacggcgaagtgcgacttcatgacctgggacgtgccggtgaaggacgactgcccggtctgcggccacaccatgttcaagaaggcgggccggggattcaagaagcccttctgcatcaatccggaatgcagcaacttcctgccggaggagaagcggggctatcccaggaagaaggccgcggacagcgccgagggcgcggagtctgccgctgcggcggaggagacagcggagaagaagcccgccaggcggacagccgcagcgaagaaggcggacaccgctaagaccgccgcgaaaaagagcgccgccaagaaaccggcagccgccaagactgccgcaaagaagcctgcggccaagaaggagacggcctccaaagcggcggccaagaccacatccagcagaaagaccgcggccaaaaagacggtcgcgtcaaaggcgaagaagcccgccgggaaggagtgacagctcccgggccaggcggaagccggagcggaagaggaagcgctcctcctgctccgtgcagcgccaggcggcggcctgataggactccagcagttcgatctgctccggggtcagggaggccagcagagcattctccaggcggctctcccgctggtagagcggccagcaggtgccggggaggttttcgtccaggtgctccaggaggttctcgaagagaatgtccagagggtcagtcatgatgaatcatctccaaaatcgtagtttaatttcgtgtttacaatatacacgaaattaaactgcaagtcaaggggtggggcatggaaaattttgcacaacgggtcagacaactgcgcaaggagtctggcaagacacagacacagatggctgctgtttttgaaatcagtgctcgccaataccaaaattatgagggcggcgggcattatccggatgtgccgggattgatgaaaatggcggactacttcggcgttactaccgactatctgctgggacgcagcgaccagaggagctaaggtgatacgggccgccgtccggcggccacggggacttctgctcccgcagggggctggtccagcgggatgcacccccattttcttttccctcttgtggaaaagaaaacgggccgtgcacggtccaaaagaaaagaccgcttagacgcgctccggcgcgttcgcgcctccgcgcgacgggggtcggcggatcggtgcaagcgccgattttggcctgccttcgggcacgcttttcccttctgcaagtttgtaactgccgtcccgtggcggatggtgcggagatcgtcggggtggtcatcgcattgaggtgcttctcttttcgctgccgctggcttggcggttgacgggagctggtgcaagctcccacgaccgccggggcagcgcgtagcgaagcggaacgcgcggaaagagaatctggtcaaatgcgtccttgcaccccgatttttgtcggaaccgcgccgcgggagtcagtgttcaagtctgcaccgtactccgccgcgcccgtcgggaagccctcgcaaccccgcaggcaccatcttacgccgacccccgtacagcaactttgcacgcacgtgcaaagttgcgaccaaaagcgattttttctcttccaccgggcgcggcgcattctctttttgtcaagaacaaaaagagaatggggggcgcatcccccgtggaaacggcccctggcgggagccagattccccgtcccatgggacgcaccatcaaccaacgatagataaaggatccaaactatgaatgtaacagttatcggcgccggcctggccggctcggaggctgcctggcagctggcccagcggggtatcgacgtcaccctccgggagatgaagccggaaaaaaagacccccgcccatgagacggaatacttcgcggagctgtgctgctccaactccctgcggagcgaccagctggaaaacgctgtgggccttttgaaagaggagctgcggcggctgggctccctgatcctccagtgcgccgacgccacccgggtggaggccggcggcgcattggcggtggaccgccacggcttcgcccgcatggtgacggagcagatccgcagccacccccatatcaccgtggtgcccggcgaggtgaccgagatcccggaggggaggtggtcatcgcctccggccccctgacctccgacgccctggcggagcggctccagtccctgttgggggcggacaccgccctccacttctacgacgcggcggcccccctggtcaccgccgagagcgtggacatggacaaggcctggttcggctcccggtatgaccggggaacggcggactatgtcaactgccccatgaccgaggaggagtacgacgccttctggaaggagctgaccacggcccaggaggccccggtccacggctttgaggacaagatggtatttgagggctgtatgcccgtggaggtcatggcccgccggggccacgataccctctgctacggccccctgaagccccggggctgaaggatccccgcacgggaaaggagccctacgccgtggtgcagctgcggcgagacaacgccgacggcacggtgtacaacctggtgggcttccagacccacctgaaattcccggagcagcggcgggtgttctccatgatccccgccctccacgacgcagagtttttgcgctacggcgtcatgcaccggaatacctttttgaactctccccggctgctggaccggtactaccggctgaaagcggagccccggctctcctttgccggccagatgaccggcgtggagggatatgtggagtccgccgcctccggctttctggtgggggtggagaccgctcggcgcctgaccggcaggccgcccgtcgatttcccccgggagaccgccatcggcgctctggggctgtatgtgtccaatccctccgtcacgatgttccagcccatgaatatcaacttcggcatcatgccgcccctggaccatcgggtgaaggggaagcggaataagaacgcggagctgtcggcccgttcactggccatcatcgaccaaatcaagcaggaggtgcgggaagcatgaagatcattgtagacgcaatgggcggagacaacgcgccgctggaaatcgtccggggcgcgctggacgccaaccggaaccatggggtggagatcattctggtgggccggacggcggaggtgctgaaggccgtggaggcctgcggccagaagagcctgcccgcaggggtggagatcaaggacgccaaagaggtggtggagatcgcggatgaccccgccatggccttcaagcagaagccagactcctccctgaccgtgggattgaacctgctgaaggacggcgcgggagacgcctttgtctccgccgggtccaccggggcgctgctctccggggccacgctggtggtcaagcgcattcggggcatccgccgggccgccatggggccccagattcccaccgccgggggacgggcggtcctctgcgactgcggcgccaacgccgagtgcacgccggagtacctgctccagtttgcgtacctgggcagctactacgcccagcgggtcatgggcatcgaaaagccccgggtgggccttctgaacatcggtgcggaggaggagaagggcgacaccctgcgccatgagacctacgccctgctgaaagaggctggggaggccggccgcatccacttcatcggcaatgtggaggccaacgaggccatgatgggcaccgccgatgtgatcgttaccgacggcttcaccggcaatgtgatgctgaaaaccatggagggcgtaggcaagttcctgctcaagtccctgaaggagatgttcctctccagcaccaagaccaagctggccgccggtctggtgaaaggggatctggggcagatgaaaaagctgctggatcccagcgaggtgggcggcacacccttcctggggatccaaaagccggtgatcaaggcccatggcggttccaacgccagggccatcgaaaatgcggtgctgcgggccaaggagtatgcggaaagcggtttcatcgcggacattcaggccaacatcgaacacatgcgggtccagcccggcatggaaaaaaattgatttcctattgacaccgccgtagagattgccgtatgattaccccagcaaggcacagaaccatttttccttgaggggtgaacgacatgtcgaatgaggaaatttttcagaccatgaaggatttggtgtccgagcagtttggtatggagctggacgaggtgacgctggagacctcctttgaagacgacctgggcgccgactctgtggacctggtggagttggtgatggccatggaggaggagttcgagctgggacagacggcggaggacgaggtcaaggccatcaagaccgtgggcgacgcggtgaattacgtggcaggcaagctgaacggataacttgcaggaacgccccgcgcagagcggggcttccttttgggagtggacgatatgcgggatctggagaaaaaactgaattacaccttccgcaaccaggctcttctcgaggaggcgctgaaccacagctcctacgccaacgagcaccgggccggtgggctgcgcagcaatgagcggctggagttcctgggggactccgtgctgggctttgtgacagcggagtttctcttctgccagcacccggaccttccggagggggacctgacccgcatccgggcggccctggtgtgtgagcagagcctgtatgaagtggcgcagaagctgggcctgggccagtatctgaagctgggccggggcgaggaggctggcggcggccgggagcggatctccatcctggcagacgccacggaggcggtgtttgccgctgtgtacctggacggggggatcgaggcggcctccgccctgatccaccgctgcctgctggacgcagagaaggaagaggtagtggaggagcgccgccgggactacaagacggctctgcaggaactggtccagcgccaggcggatcaggtgctcacctaccacatgaccggcgaggcggggccggaccacgacaagaccttccaggcggaggtgcagctcaacggactgcccatcggcgccggttccggccacagcaagaaagaggccgaacaggcggcggccaaggccgcgctggagacgctggaggagacgtgaaccgccttcggccgctgcatacaaatgagcagaccggtcctgaacggccggtctgttttttgcttttctccgggctatgcggaaatatgactggaattttcagcctggccgtgatatactcaagcatgtatgtgcgattttaaatgactgggggattgaatccattgtctttgctgtcatccatcctgctgggcctgatccagggcctggcggagttcctgcccatctccagctccggccatctggccattgcggagcacttcctgggccaggcgggcgttccggcgacgccggacttttttgacgtgctgctgcacctgggaaccctggtggcagtgttcgcggcctactggcaggatatccgggacatgatcgtggagctgatcgacggcgtccgcgatctggttcgcggcaccacacccaaccccatcccgccggcacggcggatgatcctgctgattatcgtgggcacgctgcccctgtttgtggtgctgccggtgaaggatctggtggagggcctgtccggcaatatctatttcgtggcgggggctctgatcgtgacgggctttctgctgttcgccagcgaccgggtaaaaaaaggacgcaagacggagcggagcgccaagctgctggatgtgctgctggtgggcattgcccaggccatcgccacctgccccggcatctcccgctccggcaccactatcaccgccggctgctttgtgggctttgaccggaagtttgcggtgcgcttttccttcctgctgtccatccctgccgtcctgggggccaacatcctgaccttgaaggacgccattcaggagaattccatcatcgtatcggatattcccgtgtatctggtgggagtggcggtggccgccgtggtgggctatatctgtatccgcctgctgaagatgatcgccgataaaggcaagttcggctggttcgcgtattactgctgggcagtgggcctgatcgtgctggcgctgacacttgtgctgaagtaacttgcctttggtgcgcagagcacgtccgcggcggaagcggcatcaggcgtccggcggagccagaccctggaacgggcaggttcggccaggccgctcaggaaagggcctctggaaaaccgaagattttgcggcgcatctccgttgcgctgcattgacggtaaacaaaggagattggaacctcgaaggagagaagcatggcatcctcaacgcagaagaagacgacaacgaaaaagagcggcagccgctccggctcacgcacggccaagggtaagcagcctcagaagcgtcccatccgccgggaggtggggggcgtgatactgctggtgctggcgctgtgtgtgctggtgagctactgcggcgtgcaggcgatcctcatcgacctgctggccaagctcctgaagggactgttcggctacggctactggctggccggccctgccatgctgctggcaggagggatcctgctgctgcaccggggccgcccggtcaccctgcgggccacctgcgccctgctgctgccgctgctggcaggagcgctgttccacaccattttcgcagggggagactatgcgctgaacggctggggcgttttgaagaatctctggacggcgggccttgccctgaaggcgggcggcgccgtttccggcctgctggcggaggcggcggtgctggcggtctccaaggtggtgtctctcttcctcttcggcttgctgctggcggttctgctgctggcggccctgcatgtgacgccttccgccgttctggagatggtacggaaccggccggagtacgaggaggagccggagcctacgcccgccgtccacatcgctcctgcggagccgccccagcggcggggagagcgccagagcaggcccgccatcgacattcccctggacggcgaggagccgtccgcacagccggaggaagagtccggccggtttaccggcttcttccggcataagtccgacaagatgaagacgccggaccaggtgctctccgacaaggaggcggagcaggcggcgctggaacctgcgccgtctccggcccgcgccaaggccgctcccaccccggcgcccgtggcggaagaggtatccgttccggagcccgcccccgcggcgcctgccgccccgcctgccccggcggcggggaagaaggccgtggcccaggaggtagccgctgctacggcagcggtgaccgcggagattgagcagaagctgacggaggatgcggacacctatcagttcccccccattaccctgctgcaggagagccgggaggaaaactatgccgagaccggcgcagagctgcggaacaactcccgccgcctggcggagaccctcaccagcttcggtgtggacgctactgccggagacgtggtccacggcccctccgtcacccggtatgagttcgtgctggaccagggcgtgaagctcagcaagatcaccaacctgtcggatgatatcgccctggccctgggggcctccggcgtgcggatcgcccccattccggacaagatctccgtggtgggcatcgaggtgcccaacaagcaggtgacgccggtgctgatccgggacgtgatcgagtcccgggagttcacagagcacaagtccaaagtggctttcgccctgggaagggatatcggcggccggaacatcgtgggggatatcgagcgtctgccccacgtgctgatcgccggcaccaccggatccggcaagtccgtgtgcaccaactccctgattgtgtcgctgctgtacaagtccaccccggatgaggtccgctttatcatggtggatcccaagatggtggagctggccccctacaacggcattccccacctgctgatcccggtggtgacggatcccaaaaaggccgctggtgccctccaatgggcggtgttcgagatgatgaagcggtacaagaccttctctgagcatggtgtgaagaagctggaggagttcaaccgcctggcccgggccagtgaggacctggagacgctgcccagcgtggtggtggtcattgatgagttggccgacctgatgttggtagctgctaaggaggtggaggagtccatctgccgggtggcccagatgggccgcgccgccggcgtccatctggtgatcgccacccagcggccctccgcagatgtgatcaccggcctcatgaaggccaacattcccagccgcatcgcctttgctgtggcatcctctctggagtccagaatcatcctggacaacaccggcgcggagaagctggtgggcaagggcgatatgctctacgctcccctgggccagggcaagcccacccgcgtccagggctgcttcatctccccggaggagatcgaacgggtggtggagttcgtgaagcagtccggtgaggcgcattactccgatgaggtcatggccaagatcgaggagtccatgcaggagaaggagaaaggcggcaagggcgccgcggccgcggcgccggaggccggagaggacgagggggacgagctgctccccgccgccgtggaggtggtgctggagaccgggcaggcctctgtctccatgctccagcgccggctgaagctgggctactcccgggccgcccgcctggtggaccagatggaggaacggggcatcgtggggcccttcgagggctccaagcccaggcagctgctgatcacccgtgcccagtggcaggagatgcagatgggcggcgcgcccgccccggaggcggacgagcctcccttcccgacggaagaggagacctgacggatgcaggccttcagcggagatttctgaaaacctctgcttgacaaatccccgcaaagacgtataatgggactatcataaacgcgatgacagagccagccctgcgaaaccggcttagaagcgagggggagacggtgcaagcccccagcccacgccgcacggcagccactctggagcagtccgcgaggagcggaacggcccatccccgttaccggatgacatgagatgcctcccattcggaggcagatcagggtggtaccgcggaatggaatgttcgcccctgacagagatgtcaggggcgttttttattgccggccgccgtaaatgagattacaaaatccgaccaaggaggtcttttttatgaaattttccagcaagattcagcggtgtgagctctctcccatgcggaagtttctgccctatgagctggcggcagaggccaagggccgcaagatctatcatctgaatatcggccagccggacattgagacgcccaaggccttctttgacgcggtgaagaatttccaggacccagtgctggcctatgcggcggcccccggcgtgtctgagtttctgacggcggtgcagggctactacgccaacctgggcatccacctggagcaatcggacatctacgccactgccggcggcagcgaggcgctgcagatggccctgacctgcattctggacgagggagacgagatcctgatcccggagcccttctatcccaattacaacacctttgtcagtgtcaccggcggcgtgatccggcctatccccacaactccggaggagggctaccgctacgccgaccgggcgcgaatcgagcccctgatcaacgagcacacacgggccatcctggtgaccaaccccggcaaccccaccggcgtggtcctctccccggaggagatgcgcctgatggcggacatcgccaaagagcacggcctgttccttatcagcgacgaggtgtaccgggagttcgtctacggcggcgagcctctggcctccatggcccagtttgacgatgcggccgagaacgtggtggtggtggactccatctccaagcggttctccgcctgcggcgcccgggtgggcatcctggtgtcccggaaccgggaactgatggcccaggccctgaagatctgccagggacgcctgtgcgcggccacgctggaccagctgggcgctgccgccctgtacggcgtaggctccgactacttctccgccgtgcgggaggagtaccacaggcggcgggatacctgcatggagggcctatctcagatccccggcgtggtgtgcgagtgccccaagggcgctttctacctcatggccaagctgccggtggatgacaccgacaagttccagacctggctgctggaggagttccaggacaacggggagaccgtcatgttcgcacccggcgagggcttctacggcacccccggcaagggccgggacgaggtccggctggcttatatcctgaagcaggcggatctgcggcgggccatggaggtcctggcccacggcattgaggcatacaacagccggaagctgtgagaaacgagcagaggagagcggcaaaagccgctctcctcatgtttttatgattccggtgtccagaggcactgttccagatccaccgtgccgtccaggcgaaaggccacaccctccgcctccagcagggcccgctgggtgccgggggcaaaggtgtcgaaggccgccttggtgccgccgaagcggtccaccacccggtggcagggcacggttgggtcctgacaggacgccatggcatatcccaccagccgggcgctccgtggcatcccggccagccgcgccacctggccgtaggtggacacacttccggcggggatccgccggaccacgtcatagaatgcgccgaagactgtgccgctcacttctcccgcacctcatacagatccgtccgccgggcggagaggatgggcagctgggcccgtaccgcctccagccgttccacgtccaggtccgcgtacagggttgtctcctccgccccggcccggcagagcacggcgccccagggatccacggcgatggagttgccgtaggccacgtaggagccctgttcgtcccgggcgggggagacccccacggtgaagcactggttgtccactgcccgctggcggaagagaagttcccagtgggcggggccggtagtcatgttgaaggccgccggcacgaagatcacctttgccccccgcaggcacatgcaccgggccagctcctcgaaccgcaggtcgaagcagacgcacagccccatggtgccgaaggccgtctcgaaggtggtgatggcatttcccggggagagggtgtccgactcccggaaccgctgtcccccctggacgtcgatatcaaacaggtgggccttccggtgcttggccagctggcggccgtcggggccgtagacgtagctggtgttgtagatccggccctccgacagctccggcacagtcccgcccacgaggtagagccccagctccgctgccaggtgggacagggccgtctgggcctcgccgccctccggttcgccgtaggcgccgaagcagctgttgtcgtaggggcagcagaacatctccggcagcacggcgaagtccgctccattcttggccgcctcccggattttgccgcaggcggtctggatatttttcactttgtctggaagcaccggcatctggatcagcgcaatgcgcataggcgcacctcctcaatcattccgtcatttcccgcagcaccagatctgtggcgcccccgtcgggggagcggagcaggcgcttcacctgcgggtggtgcccgtattccacctggagaaagtcccgcagggccgtgccctgatgacagccatggatcaggcggagccggtacgtcccggccccggcccggcggagcagggcatccaccgtgaccttggcctgataggtgttcctgccgtggaggtccacggtgacgattccgcactccatgggcggctgcctcctctctcccgccggagggcggggaatgctcttctcccattgtaacatgggcggaactgtgttacaatgcaaaaaacagaggaggcatggaagatggcagtttacacggagaaaaagacataccacaccaaggcccacatgggcatgatcgacgtgacggaggactttcagcacgcagtggaggaggcatgccggcagcacggcatctctgccgggacggtcaccggcttcaccaccggcggcgtggcgggcctgacgaccctggagttcgagccgggcattgtgaaccacgacctgaaggcggcgctggatgtgttctccccctatctggatgagaaggggcgggtggtgccttactggcatcatgagacctggcatgacgacaatggatcctcccacatcaaggcggcgctgctgtcccccttcatcacggtgccttttgtgaacggcaaaatcaccgtagggccctggcagaacctgaccctcatcgagtgcgacacccgggaccgggtgcgggacattgtgttccaagtgatgggagagtgagtgcagcgtgggtgccgagcgtccggcattcaagcgttccggcggagcagggaccttggcgcgggcgggctctgcctgcccgcaccagtgagatgcagggcccccggccgcgccaagcggctgggggatgcgacacccgggaccggatgcgggacattgtgttccaagtaatgggagagcaagcagctcggcgcttacaaaaaagatcacagcatgaccaaagaaacacgccccggaatgggggcgttttttttgcatactgctgtcgaaaagcgcagaaaatagattgcaatttgtgcagagttgtggtatccttcttctactgccctttaaagggatgccacaggaaagctttaaatagagaaaggggagagccatggaaaagcggtacggcctgcccacggccatctgcatggtagtgggaatcgtcattggctccggtgtgtttttcaaggcggaaaaggtgctccaggccaccaagggcaacatgcctctggggatcctggcgtggggaatcgtgggcgccatcatgattatttgctcctatgtgttcgccaccatggccacccggtatgaaaaggtcagcggcctggtggactacgccgaggccaccgtggggcggcggtacgcctactacgtgggctggttcatggcagtgctgtacacgccctgcctggtgtccgccctggcctggatctccgcccggtacttctgtgtactgctgggctgggacatcaccggcggcgcctgcatgaccatcgccggggcgatgctgtgcctggaccacgtgctcaacgccctggcacccaggcaggcaggcaggttccaggtgtccaccactgttatcaagatgatccccctggcgctgatggccgcctgcggcgcggcggtgggcatgatgaacggccgcatggcggagaacttcgccaccatgagtaccggcgccatctccaccggcgaggggctgatggcctctaccgtggcggtagctttcgcctatgaggggtggatcttggctacctccatcaacgcggagctgcgggatgccaagcggaccctgccccgagccctggtggtgggctcttttatcgtggtgctcacctatattctctactacatcggtctcaccggcgcagtgacgacggaggagctgatggccagcggcgaggcagcggccaagatggccttccagcgggtgttcggggagacggcgggcacagtggtgttcgtgctgatcgtcatctcctgcctggggaccctgaacggcttaacgctctcctgctgtcgggggatgtacgctctggcggtccggaacgaaggaccgatgccggagctgttccgccaggtggacccggtgaccaatatggcgggcaactccgccctggttagcctgggcctctccgcactgtggttggtgtacttctatggcgccaatgtgggcggaccctggttcggcgccttcagcttcgactcctcggagctgccgatcatcaccctgtacggcatgtatgtgcccatgttcattcaattcatgcggaagagcacggacctgaaccctttccggcggttcgtcatgccggctctggccctgtgcgcctgtgcttttatggtgtatgccgcctttgccgggtatggagtgaccgtgctgtactatctggtggtgtacgccgcggtcatgggcatcggctggctgtttgaccggcggaaaaaatgaaaatagtggaagattagggattgacaatgtggggaaaatggagtatagtgccttcagtaccaaaagggagtagctggcacatttgattgtgtacccaacggcgtcagtacgggcttcggccccgcttcgggttgaaacggcgagacttttgtatcaatgcagaggcattgacgcaaaagtctcgtcttttttgcgtcttgccggaaagaaggagttttatgaaaacggaaaagactatctggcagaagagccgggaagagctgtttcaggagttgagcagcaccccggagggcctgactggcgcggaggccgcccgccgcctggagcattatggccccaatgagctgcaggagggcgggaggaagagcgtcctgcggatttttctggagcagttcgcggactttctggtaatcattctgatcttagccgccgtcgtctccgccatcctgggggatgtggagagcatggcggtcatcctggcggtcatcaccatgaacgccatattgggcacggtgcagacggtgaaggccaccgcgtccctggacagcttgaagcagatgtccgcccccaccgccaaggtggtgcgggacggtcaggtggtccagctccccggccgggaggtcaccgtgggcgacgtggtggtgctggaggccggcgactccatctgcgccgacggccggttgctggagtgcgccagcctgaagtgcgcggagagcgccctcaccggcgaaagcctgccggtagagaaggacttggcggacatcgacggcgacgtgccgctgggagaccgcaagaacatggtgttctccggctgcttcgtcacctacggccgggcccggttcctggtgacatccaccggtatgcacacagagatgggcaggatcgccgccctgctgaagagcacggaggagaaaaagacccctcttcaggtgagcctggaccagttcggccgcaagctctccatcggcattttggtcatctgcgccctcctctttgccgtcagtgtgttcctgcggggcgagaatgtgatgaacgccttcctctttgccgtggccctggcagtggccgccattccggaggccctcagctccatcgtcaccatcgtactgtccttcggcacccagaagatggccagggagcacgccatcatccgcaagctccaggcggtggagggcctgggcagcgtgtccgtcatctgctccgacaagaccggtaccctgactcagaacaagatgactgtgaagaagctctgcaccgggggccagatcatcccggcggacggggcggacttctctcgcccggaacagcgggagctgctgcgtgccgccctgttatgcagcgacgccacggtgaacgaatccggagaggtgggagaccccacagagaccgccctggtgcgcctgggcgagagctacggcttcgacgaggcggaggcgcggggcaagtatccccgtctggcggagctgccctttgactccgaccggaagctgatgagcacagtccaccagttgccggacggcctgaccatgctgaccaagggggccgtggacgtgatgctgggccgcactcgcctctctccggaggagaaggcggagatcgagcggatgaacgaggagctgtcccagcagggcctgcgggtgctggccttcggcaagcggatgctgaccgcccccgccatcggcctggaggatgagaacgacctccagttcctgggcctcatcgccatgatggacccgccccgggaggagtccaaggcggccgtcggtgagtgcatcgccgccggtatccggcccatcatgattaccggcgaccacaaggtcaccgcctccgccatcgccaaggagatcggcatcctcacccccggcaccgaggccgtggagggtgccgttattgagtccatgagcgatgaggaactgcgggagttcgtacccagggtcagcgtgtatgcccgggtgtccccggagcacaagatccgcatcgtccgggcctggcaggagcggggcaatctggtggccatgaccggcgacggcgtcaacgacgccccggccctgaagcaggcggacatcggcgtggccatgggcatcaccggcaccgaggtggccaaggacgctgccggtatggtgctgacggatgacaacttcgccaccatcgtccaggccgtcaagaacggccggaatgtttataccaacatcaagaaggccatccagttcctgctctccggcaacacagcaggcattctgacggtactgtatgcctctctcgcggggctgccggtgccctttgcagcggtacacctgctgttcatcaatctcctgacggactccctgcccgccatcgccctgggcctggagccccacagtgacgcggtgatgcaggaaaagccccgtccccgcagcgagggtatcctgacaaagcccttcctgttgagcgtgggcacggagggcctggtgatcgccctggccaccatcattgccttccacatcggcctggccagcggcggcgctgccgtggccagcaccatggcctttgccaccctatgcctgagccgcctgttccacggcgtcaactgcaagtccggccatccggtgctcttcacccgggccttctggaacaacaagttcctgctgggcgccttcgccgtcggcgcgctgctgctggcggccgtgctgctgatcccaccgctggagcctctgttccaggtggcggagctgtctatcggactggtgggctgcattgtggggctggccttcggctccatggtggtcattcaggtcttaaaagccatccgcagcatgggcaagaagtaaatccactccaaatcaaagcggcagggccgccccttatggggcggccctgtttccttacgcgccggtgtaggtccggacggcatcccgcagaaaggcggcgcagccggggacttcccggtcatagtaggcggtgaaccggggatcggacacatacagctctgcaaggcccacatgggcctggggcgtgtaggactcccaggagtaggacagccaccgccgatggagcgccgcaatccgctggccctccggcccggcggggtccgcccctgctttcacggctgtgacgagagcggtgtggatctcaccccccagggacttccactgggcatactcctcctgggtcagcgccaggacgcaggcgttggcccggtccatctcctcatctccgtatttctcccggatctcctgcccgaaggcggtctcattggcctctaccgtgcggcgcttgaaggcttcaaatttctcctgatcggtcatcttcgttcctcccttgatgtcgttaatcgttcgctggacagtcaggatcagatcgtccagtcgggcccgacgggcctccagctctgccaggtggctctgcagcgccgcctggcggtcaaaggccgggtcgtccagaatggtccggatcgaggccaggtccagtcccagctcccggtagaacaggatgtcctgcaggcgatccagttgcgctgggccgtagaggcggtatccggcctccgtggtccgcagaggtttcagcagtccaatccgatcataccagcgcagagtcctgggcgtgacgccggccagatcggccagcgccttgacggtgtattccatagagatccctcctgtcgattggcagtataacagttgacgctgcggcaaggtcaagggggttcacgaaaaaaaccaggctttctttttccatggcaatgaactataataggataacaccatttcaaggatcacggaaggggggatggcagatgatcaattccaccctctgctatctggagcggggcgacgcttacctgatgctccaccgggtgaaaaagaagggcgatctgaaccatgacaaatggatcggcgtgggcggcaaattcgaagatggggagagccccgaggactgcatcctccgggagacctgggaggagacgggcctgacgctgacggactaccgctaccggggcctggtgacctttgtgtccgatgaggcacccaccgagtatatgcacctcttcaccgccactggctggaccggcacgccccacccctgcgatgagggagagctggcctggattaaaaaagcggagctgcggggccttcccatgtgggagggggacaaaattttcctccgcctgctggaggagaacgtccccttcttctccctgaagctccaataccagggagaccggctggacagggcggtgctgaatgggaggcggattgtatgatacccgctctgacactggagccgctgtcctgggacgatctcccagaggcggcggttctgtgggccgacccggcggtgatccgatggaccaatattgctgccccctgcacggaggcgggggcggcagaccggctggaacacctgctggactgccagcgggggttgccgttctccacggtctttgccctccgggaggggacggcattccggggactggccggctgcccgccggtggatacggccgccgggatctatgggctgttctaccagctgctgcccgcctgctggggccggggcttgggacttgcggctgcggcggaggcactgcggcgcctggaacggctggcaccggccctggtgctggcagacacggtggcagagaataccgccagcgtccgaattctggagcggctgggctttgtccgcaccgccgtccaccacagggctttctgccgggaggggcggatgctggatatctgggactacgcccgccgctgggctggtccggcggagaccgtctgaccgggacggccccgtgcaacatgaagaaatgaggaatgttcatgagcagaaaactgctgctgttcggctttgaggaactgcccaccattctggctgccgcggccgccgccgggcccttcggggcggaggtggtgccggtggcccggcaggactacaacaagcccctggcggtgctggcggggctggatgatgaccccggcacggtactgccgttcaacggcggccctctgggtgggcggatggtggtgctgtgcggcctggaggaccaggtggactgccttctgccggcgctgcgtcaggcggggatcgggcgggactgcctgaaggcggtgctgacgccccacaaccggacctggaccgctgtgaagctctatcaggagctgctgcgggagcaccaggccatgaacgggcggtgagaagatgcggatcctaatctctgcctgtctgctgggggcccgctgtcggtacgacggggtctccaagctccagccctggatctctgatctggcggagcggcacatcctggtccccgtctgtccggagcagctggggggtctgcccacaccccgtccgccggcggagcggcggggagaccgggtgatgacccgggacggtggcgatgtcaccgcccaataccgccggggcgcggaagaggccttgcgtctctgccgcctgctgggatgcgaggcggcgctgctgaaagagcggagtccctcctgcggcagcgggatggtctacgacggcacctttaccggcgtgctgacggcgggagagggtgtcacggcggagctgctgcgcgcccagggcattccggtgtacggagagtcccgggtggcggagttggcggaccccatctgaacaggccagacagccacggacggcgcagcgcccggagaacggggcggcgccgttcttttcctccccggcacggtttacaaccaggggaaaacgtggtagactcgaagccatgaatatgggagaggagagagaaacatgagccgacaggatgtcctggccctgctgcgggaacaggagggggcgttcgtctccggcgaggagatcagccaccggctgggactgagccgcgcggccatctggaaggcggtggatgcgctgcggagggagggctacactgtggaggcccgcaccggccggggctaccgtctgctggatgcgccggacgtgctgacggagccggagatccgccgctttctgggggagacggcccgggtgggccggaccttggtgtgtctggcagaggtggactccaccaatctccgggccagacagctggcagcggagggcgcagcggacggcactgtggtggtggcggaccgccagacggctggccggggccgactgggccggagctttcagtcccccggcggccaggggatctacctgacggccctgctgcggccggatctgccgccggagcggctgtcgccggtgacggccatggctggagtagcggtgtgtcgggccgtagagcggctgtgcggcgtcagccccggcctgaaatggcccaacgatccggtgctggatgggaaaaagctctgcggtattttgaccgagctctccctggagggggagacggcccgcgtgcaggagctggtgctgggcatcggaatcaatgtctcccagcggccggaggatttcacgcccgaggtgcgggagatcgccacctccctggtccaggccctgggccacgctgtgtccaggcccgccctggcggcggagatcatccgggaggtggaccgcctctgcgcagccctggcggcaggagagactggtccttatctggccgagtaccggcggcggtgcgtgaatctgggccggaccgtgcggctgctgcgcccggacggaggcggcgagacggcggaggcattggacatcgatgaggaattcggcctggtggtgcggaggccggacggcgcggtgaagaccgtgcggtccggcgaggtgtccgtccggggcctgtacggatatacagagtgagagacagggggagatagggttgaaagagctttggacattgttttggaccttcgcgaagatgggggtcatgaccttcggcggcggcatggcgatgctgccgattctccagcgggaagtggtggagaacaagcactgggccacagaggaggaactgacggactactatgccatcgggcagtgcacgccggggatcatcgctgtcaacacggccacgttcatcggccagaaatacaagggcatcgccgggggcattgtggccaccctgggggtggtgttcccgtctctggtcattatctccatcctggcggggctcatcaacaacttcgcggacctggcctgggtccagaacgcctttgcgggcattcaggtgtgcgtgtgcgtcctgattttcaacgccacggtgaagctgctgaagaagtccgtggtggataagcccacggcagcgattttcctggcagtgctggtgggcagcgcggtgatggatgtgtccccggtgtggttcatcctcgcggccgcagtgctgggtatcctgctgaagaactgggaggtgaagggggcatgatctatctgcgcctgttctgggagtttttcaagaccggactctttgccatcggcggcggtatggccacgctgcccttcctccacgacatcggggaggccaccggctggttcacccaggcccagctcatgaacatgctggcggtgtccgagtccacccccggccccatcggcatcaacatggccacctatgtgggcttcaccgttgccggtgtccccggcgcggtgatcgccacattgggagaggtgacgccctccatcatcgtgatcctgattattgccgccctgctgcggaacttccgggagaaccgatatgtggaccgggccttctacggactgcggcctgcctctacgggcctgatcggcgcggcctgcgtgtccgtggtacttgaggtgctcaccaacatcgtggtggcgtcgccggagacggggctgttcaaccagttccagctgggggacggcggcctggcgggcctcatcagctggccgggcctgatcctggcggcggtgctgctggcactgaccaattgggtgaaacccacgaagaatctccatcccatcgtgttcatcgccgcctctgccgtggtgggcgtggtgttccgcttcgcgggggtatgaggatagaccgccaggacctgtatgccctgttgcgggcgcggaatatcccctatgaggagacggcgcacccggcggtatggagcatggaggagctccacgcactctgtctgccgggggaggagcggatcttgaaaaacctcttcctgcaggacgacaagaagcggcggtactatctggtggccatagacggcggccggacggcagacctgaaggccctgcgccggacactggacagccgtcctctgagatttgcggacgccgcagacctggagcggcttctgggcctgctgccgggacaggtgacgccgctgggggccctccgggcgcctgccggcacggtcaccgtggtgttggatgcgtctttgcggggccggaccgtgggcgtccatccgctggagaacaccgctaccacgtttttgaatctggacgatctggccgcgctgctggaggaccatggtgtaccggtgatctggtgtccgctgtaatacgcacaagccgcccgccggagaatcccggcgggcggcttgtgcccatctggcagcgggccgtcacttcccatcgatgtggtgctggatccgctgcatgatcatgtccagggccaccaggttgtggccgccctccagcaccacgatgtccgcgtacttccgggagggctccacatactgctcatgcatgggcttcacagtggtgagatactgggagaccacggactggagcgtccggccccgctcctccacatcccgcagggcccggcggaggatccgctcgtccgcgtccgtctccacaaagatcttgatgtcgaacatatcccgcagagtggggttctggaagatcagaatgccctccacaatgatgaccttggcgggctggatctccacggtttggtcggtgcggttgtgctccacaaaggagtagacggggcactggatggagcgtccggccttcagctcctgcaggtggcggatcagcaggtccgtgtcaaaggcgttggggtggtcatagttcaccttggcccgctcctcataggtcctgcccacctggcgcttgtaatagctgtcatggccgatgacggtcacgtctttgccgaagtgttccttcaaatgccgggtcagagtggtctttccggagccggtgcctcccgcaatcccgatcaggatggtgttcatgttcccgattccccctaaaatctcccagttctgtgaaacaaaaccgcgttcttttgcgtccattatagaagaggcgctccccaaaagcaagcggaaccgcggaaaaagcgtaaatttcccagggaatcgacgcttccggtcttgacggcactgggaaaagccgatattatgtaaattatgaaaagctgttacgcgggaggatgacccatggccatgaaacgctgccccatctgcggggaaaagtattccgatacatacaagagctgccccttctgcgaggaggaagaggcgctgcagagcggtgcacagatccgcaggaccgcccccggacggggcggcaaacggacggccgcccgcggccgccagcccaatctgctgagtcccattctgattgtgctgatcgtcattatggcggcgctgctggtctacctgctcttcggcgaccggatcgcccagcgcctctccggcggagaggagacccaggacacttccacagaggatgtgacgccccagccgccggaccctgatacggcggacccggaggggggagacggcgtgaccatgccggagagcggcggcaccggcgagatggaagacccgaatgacggcggcaccaccacacccgcccagacggatccctccaccctgccggagacactgaccatcgcctacctgggttcccccggacggagttcaccatgtccgtgggagatgagcccattcccctgactgtctccggcggcagcggcacttatacctggagcagcagcgatgacggcattgcctccgtggattccaccggccgggtgacggccatctcctccggacaggccaccctgacggtgacggacggctccggcaagggcacctgcctggtgcgggtccggggcggcagcaccggcacatctacgtctgccagcggcggcagcaccgcgtccggcagcacgctgacagcggggaccgcggtggtggtcaacgccgggaacggcgtgcgggtccgcgcgcaggccaacaccagcagtgagattctggcgaccctctccaacggcgactccgtccgggtggtgcagagcgccgggaacggctggtatcagatcagctttgtggcctccggcggcgtaaccaccaccggctatatgatgggcgagtatttgtccaattcctgaaaaaacaacatggcgatatccccggatgttggatgacattcggggatatttcattgcgcgcgggggaaaagtgtgctatcattttttagatatgaattgataaagaaaaaggagagtaccatgacgacccgacagtttcaggagagctccgccctgcggatcttcctgtcctacttcaagccccaccggaagctgtttttcctggatatgtgctgcgccctgatgatcgccgtgatcgatctggcgtttccctacgtctcccggtggtgcatgtaccagctgctgcctgagagcgcctaccggaccttcttcgccgtgatggcggtggtgttctgcgcatacatcctgcggtccgtgttcacctatatcatctgctattacggccacaccttcggcatcctggtggaggcggacatccgccgggacctgttccgccacatgcaggagctgagcttcgactactacgaccgcaaccgcaccggacagctgatgagccgcctgacggcggacctgttcgacatcacggagctggcccaccacggaccggaggacatcttcatctccggcgttaccattgtgggcgcgctggccatcatgttcaccatccagtggcagctggctctggtgatcgcctgcatcatccctgtgttcttcctggtggtgtggaagtgccgcaagtccatgcaggacgcctcgatcaaggtgaagcagcggacggccaccatcaacgccgacatcgagtcgggcctctcgggcatcaagaccgccaaggcctttgccaatgaggaggcggagctggagaagttcgacgtgtccaacgacagcttcaagacctccaagcgggcgttccaccgggccatgggccggttcaacgcggtgatggagttcttcctgtgcatcctctccgtggcggtgatctccgtgggcggcttcctcatcatgcagggccggatggacacggtggacctcatcaccttcagcctgtatatcacgaccttcgtgaacccggtgcgcaagctctccacctttgcggagctgtttgccaacggcaccgccggctttgcccggtttgtggagctgatgcgggaggagcctgccatgcaggatgcccccgatgccaccactctttcccgggtggaggggcgcatcgacgtggaccatgtgtccttcgcctatcaggatgacatggcggtgctccacgacgtggacctccacattcgccccggcgagaccatcgccgtggtggggccctccggcggtggtaaatctactctgtgccagctgatcccccggttctacgatgtgacggacggcgcggtccgcatcgacggccacgacgtccggcaggtgacccaggagtccctgcggcagaatgtgggcgtggtgcagcaggatgtattcctcttcgccgccagcattctggagaacatccgctacggcaagcccggcgcctcggaggaggaggtggcccgggcggcgaagctggcggagatctatgatgacatcgtggccctgccggaggggttcaacacctatgtgggggaacggggcaccctgctctccggcggacagaagcagcgcatctccatcgcccggatcttcctgaaggacccgccggtgctgattctggacgaggccacctccgccctggacagcgtgacggaggccaagctccaggagacctttgagaagctggcccacggccgcaccaccatcatcattgcccaccggctttccaccgtccgcaatgcggaccggatcgccgtcattgaggacggccgcatcacggagctgggcagccacgaccagctgatggcgaaaaatggcgcttatgcggagctggtgcggacgcaggagctgatcggccatggaaaagagtaagttgctggaccgctgcggggccgagggggaggaccggctgctgctggccaaggtcctggaccgggctgcccaggcggaggagcgcaatattcccgcctgtacggactttctctccccacagcagcagatgatggccggggacctgctgcgtcttgcgggcatcccggagaccgcttggctccgtcagggaggctaccagggagcggagcggaacatcctgcttttcctgccggactggatggagccggagacggcggagcccccgctccgatgtctgcggggggccttccggccggacgaccggctgaaccaccgggacatcctgggcagcctcatgggtatgggcatcgtccgggagaaggtaggggacattctggtgtccccggagagtgcggacctgatcgtgctggacacggtggcggatttcctgctctccagctggaacagcgccggccgggcgaagctgacggtgacggagatccccgccgcccacctccacatcccggaggtgcggtgcgaggaggtgcgggacacggtcagttccctgcggctggatgcggtgtgttccaccggttttcggatggcgagagggaaggcggtggatatgatctcttccggccacgtccaggtgaactggcggccctgtacgaaggcggacaagctgcttacagagggggacacggtctccgcccggggatttggaaaatttcagttggcggcggtgggcggcgtcacgaaaaagggccgcaccgccattgtggtgaagcgatatatttgagagaggagggtgcagcgtgctggaatacgagtttgaagaggtatcctgcggcgaggtctacgggttttacttgcgggagaccgctgctcatcgggaggtcatcgtccgccgggcggcggatggctggcgatatgtgggatgcatccccaaaagccagcgccggccttacggctttatcgagagcatcgacctggtattcgagcgccagcggcctgagacctgacaggaggagcgaaacatggagcaaaagcagatcgaccgcatcaacgagctggcccggaaggccaagacaccggagggcctgacggagtgggagcggatggagcaggcggcattgcggcgggagtacatcgactccgtgctggggaacctgaagagccagctggaccacacctatgtggtggatgaccagggcaacaagcggaaactgaagcagaaggaggactgagtgccgtggccggaaagaaacagaagcaggaaggcgttggcgcttggatagccatcgtaatcctcttcgccgtcggcctgtggcccatcgccctggtgatgctgctggtcaaactcttcggaaacgacgggcagaagcggaggcaggccccgcccccgctgcagacggcggcgccggagccggcggccgccgcatccgccgggactgccggcaggaccaaaaaggccgtgcgcagcgccatgaagtccccggcggtgaagaagtctaacgccaagtggctgaagatcattggcgcggtgctggcggtctgcggcctggcggcctgctggtccaccatcgagatgatgatttggctgggcggcgtggagccttggtatatcgaagagctgctgtgggccttagccattgctgctgccggtggggctatgttctgcagcggggtctccatcggccgcagtctgaagcggtacaacaagtatctggccgtggttgggaattacgaggctatggcagtggaacagctgtgccgcaccctgggctattccagggaccgggtggagaaggacctgcagaagatgatcgataaaggctacttcggggatgaggcgtatctgaacatggagctggggtatctcttccgcagcggccaggcggacgcggacctgaaacagaagcgccggcaggaggaggcggccgcggcgccgccccccaaggagacggaggagggctgctccggaatcctgcggaggatccgccgggccaacgacgccatcgcggacccgggactctctgccaagatcgaccggctggagaccatcaccgccaagatcttccgggcggtggaggaggacccgaagaagcgagaccggatcgataccttcctgaactactacctgcctactacccagaagctgttggactcctacgcggagtttgaggctgccggggtggagggggagaacctccgccaggccaaagcccggatcgagtccaccatggacctgattatcaagggctttgagcaccagctggacgagctgtacaaggccgacgccatggatgtggacagcgacatccgggtaatggagaccatgctggagcgggatactgccagtgtggaaaaggactttggcctgggagagttcgcagcggaacagaagccggaagagacggaataaaaagggacccggcgcggaaatccgcgccgggtttctttgcgtcggggacttacttgccccaaacgtccgctaccagatttttgtacatctctacatagaacagggagtccatgcccaaggtaacgctgtcaaagccctcggcaaaccgctggcggctggctgccgcactgccggtaaagatgatggagagcttgccgctgcgcttgcaggccgcctggacccgcaggatggcgtcatggaccaccggtgcgttgaactcgccggggtggcccagggcaatggacaggtcaaagggccccacaaagatgccgtctacaccgtccatagcggtgatctcctcaatgtgctccaggcagcccacagtttcgcactggggcagcagcagcgtctcccggttgctggtctccatatagccggaaatggagaccgcatgggcggcgtggccccagccgccgtcccgggtggggcagaagccccggttccccagaggcgcgaacttggcataccggaccagctcccggacttcctccacggtctccacgcaggggaccaccacaccctgggcacccacgtccagcagccgcagcactgccgtgcgggagatctcattggcccgggccagggccgtcaggcctgcgccctgggcggcggcgatctgggccgcagcggattcgatcccggcgggggagtgctccgtgtccacgatcacatagtccagtccggtataacgcaggctctccaccgccagggggctgccgatggcggagaaggttcccaggctctggcggccctggtgaaatttttctaaaacagtattttccatagcatccgatcctcctgaaaatcattgattctattataccccccggaggatgcctgtcaattccggagtagcgggcaaaaccctccaaaaatcatgccaaaaacagcaaaagggttggcccaaaggccaaccccttcgtactgatatggagagtgcggaaggactgcttacagctcgcagagcttgaggagctcctcccagtttttgtccacttccttctggacctcttcgatcatccactcgttgccgggcttgaacatgtgggcaaagcggccctgcatcttcaggtactcctccaccggcagcttgttcttgggcttgtagctgaggatgtatttgccctcaaccacctcgtacagcggccacacgcaggtctccaccgccatcttggtgacctccatcagcttctcgctgggataccgccagccgcgggggcagggcgccatcacgttcaagaacgccgcgccgggggtgtagatggccttgtgggccttctccgtgatgtccttgaagtttccgatgaacgtggtctgggccacataggggatgccgtgggccaccatgatcttcgtcaggttcttcttctgctgcatcttgccggggatcaccgtgccctgaggcgtggtggtggtgtcggcaaagtggggggtggaggaggaacgctggatgccggtgttcatgtacgcctcgttgtcgtagcagacatacaccatgtcgtggccgcgctccatggcgccggacaggctctggaagccgatgtcgtaggtgccgccgtcgccgccgaaggcgatgaacttgtacgtatcatccagcttgccccgcttcttcatcgcccggtatgccgtctccacgccggagatcgtggccgccgcattttcaaaggcgttgtggatgaagctgtccttccacgccgtgtaggggtacatgaaggtggagacctccaggcagctggtggcggagcacaccaccgccttgtcctccgggttcagggcacgcagcaccgtccgcaccgcgatgggagagccgcagcccgcgcacattctgtggccgccggacaggcggtcctctttcatcaggttttctttcagactatatgccatgactgttttccctccttattcccggacgtccaggtagcgataggtctcgcccacctcgccggtggccgcgatcttctccagctccgcgaacacgtgctgaatgctctccacccgcacgtcgcggccgcccaggccgtagatgtagttgatgcccttggggccgctgatgcccgccgcgtacaggctggccgtgacctccgcgaacatggggccgcagtgggcgttgaagctgtcgtccttgtccatcacggcgaaggccttcacgttcttcagggcttcgcagatatcctcactggggaagggacggaaggagcggaccttgatctggcccaccttcttgccctgggcccgcagctcgttgatggcctccttggcggtgccggcggaggagccgatgatgacgatggcctcctcagcgtcgtccatcatataggtctcgatcaggccgtaggtccggccggtcatctcgccgaattccttgcccaccttgcggatcacgtccttggcgtccatcatggcctgggcctgctgccgcttggcctccatgtagtacacgggcgtggcgtaggcgcccacggccatgggctcgccgggcttcagcagcgcgtgggcgggcttgtactcacccacgaactccttgaccttctctgtctccaccagctcgatgttctcgatggcgtgggaggtgatgaagccgtcctggcacaccatgatgggcaggctcaccgcctccgcgatccgcatggcctgcaggtagttgtcgtaggcctcctggttcgtctccgcaaacagcatcagccagccggcatcccgcacgcccatggcgtcggagtggtcgttgttgatgttgatggggccggacagggcgcggcaggagacggccagcgtgatgggcagccggtcggaggccgccacgtacagcatctccgtcatgtagcacaggccgcaggaggaggtggcggaaatggcacggcagccagcagcctccgcgccgatgcaggtagacatggcgctgtgctcgctctccaccgcgatgaacagcgtgtccacttccccgttgtccacgtatgtagagaagtactgggggatctccgtggacggcgtgatgggatacgcgcccatcacatccgggttgatctgcttcatggcataggcgaccgcctcattgccggaaagtctttctctgattcccattgttccttcccctccttatttctcgtccttgaccatagtgatggcccgaaggggcaggtgttggcgcagatgccgcagcccttgcagaagaagtagtcgaagtcctcccgcttgccctcgccgttcaccgggatggacatatccgggcacaccggcgcgcacagcaggcactgccggcacttgtcccagtcgatcacgggcttcatggtccgccagtcgccggtctccaccacgctggacgtgccgccctcataaatgttgcagcccggggtgatgtccttccaggtcacgtccggggtcatatccttcgccagatggctcatcctacctgcacctcctccagagatctcttcagcgcccgcatattgccctcgatgacctggggcttgctggcgaacttgtgcttgaaggagccctccatatccttgatgaactcctcctccccgatgacgccggacaccctcacgatggcggccagcatgggggtgttggggaagttcttgcccagctcctcctcgctgatcttaccggcgtcgatggtgcagacccggccctcgtagcccttcagcaggggccgcagctccgcgggggacttgctggagttgatgacgatggcgccttccttcttcaatccggcggtcacgtccacggcggacagcagggtctcatccacgaccaccacatagtccgggaagtagatgttggaatggacggtgctccgctcggagctgatccggttgtaggcggtgatgggcgcgcccatgcgctcgggaccgtactccgggaagccctggacatacttgcccgtgttgaacgccgcgtccgccagcagcagcgacgccgttttggcgccctggccgccccggccgtgccatcggatctctacaatgtctttcatgcttgatcctcctcgttcggtttggcccccaagcgggggccgtctcgaaatttgccgttttgagtgcttgtcagcatgtatagtatagtccttttctgcgaggaatgtcaattctataacaaattagacagtatagaaatctgtgaatgccagcggcttctttttgttataagtgcgcaaatagctggggactctgttctgtattcctgcctttttgcacaaaaaagagtcctttttttcggcgctttgctcgctggaagtagcatactccagtatggctgacaggctgggcagccgcagcacaggtgaaaagcggctcccggcaccgtcgtgggcgccgggagccgcgggatgtatttgaaagccgcttaccgggccgcctggagcagcttttctgcaatgacctctacatcttcaccggaggccacaaagtccatgacattgggcagggagagggagcggcgcagcagcgccgtgtagtagcgcatcgcccattcccggccggtgacagagcagtgctggatgatttccacaagctctaccagttcctcccgggacaggtcggggatacagggcggttccggcgtcagtgtgagccgtgccaatgtgtccaggtccgtccagctccagtattccgcaaattccacatcagtgtggactttgcccgtgagagcggccaggtcctccagctccgcgccggcggtaccgggttctttgtctgcaatggctgcaatcagggcctccaccgcgtccagcttgccttcgtcgattcggggaaactccagtgcctttctcatggtgcgcctcctctgaaatcttagcgttttcttaactttaccagagttttgcaagtttgccaagactaatccgctgcatgggactcgcaaaccggaccttgcatttgaggacgaggtgtgctatactgcataatctgaaaacaattctcattttcaaaggagatcagactgtggaaaaacgtattcggttgtgtgccgcgctggcgatggtgcttctgttgaccgcctgcggacaggctccggcggagcatgagagggaagagcggctgacagtggtggctacggtattccccgcctatgatttcgcccgggccgccgggggagagctggcagaggtgcggcttctgctgccgccgggagcagagagccattcctacgagcccaccccggcggacattctggcagtgcaggagtgcgatctgttcctctatctgggcggcgaatccgacgcctgggtggagacgattctggagtccgtggacatgcagggcgaggccctgcggatggtggactgtgtggacctgctggaggaggagacagtggagggcatggaagaccacgagggccatgaccacgaccatgcggaggggcccggcctgggagaagtggtgggctacgatgagcacgtgtggacatccccgaaaaatgccgccgccatcacccgggcggtgggggacaggctggcggagctggacccggccaatgccgggacttacgccgccaacacggagggctacgccacccggatcgaggccctggaccgggaattcgcggacttcttcgccggagtggaggaccggaccatggtgttcggggaccgatttcccctgcggtacttcgcggaggaattcgacatcgactactacgctgccttccccgggtgcagcacccagacagagccctcggcagccaccatcgccttcctgacggacaaggtgcgggaagaggggatccccacggtctggtacattgagttctccaatcatctggtggcggacagcattgcggaggccgcgggcgtcaagacggccctgttccacacctgccacaatgtatccacggacgaactggaggcgggggccacttacgtgtccctgatggagcagaatctggagacgctgcgggagaatctgtgatctgaaaagaagagcgccggggctgcagcggatgtcgcagccccggcttttttatgggaaacggcggagaagcctttgacaggggcgtgcttccgccgtatcataggagtcagagaggagagatggtatgctggcttatacctatttggaaaaaggaaccttccggctgacggacaagccgaagcctgtgctgcgggaacctggagacgcgctggtccgggtgacgctgtccagcatctgcaccagcgacctgcacatcaagcacggctccgtgccccgggcggtgcccggtatcaccgtgggccatgagatggtaggtgtggtggaatcggtgggtcccggcgtccagacggtccgccccggcgaccgggtgagcgtgaatgtggagacgttctgcggcgagtgcttcttctgccgccacgggtatgtcaacaactgtacggatcccagcggcggctgggccctaggctgccggatcgacgggggacaggcggaatacgtccgggtgccctacgcggaccagggtctgacgaaaatcccggagagcgttacggaccggcaggcactgtttgccggcgacatcctggccaccggcttctgggcggcccgcatcacggagatcgggccggaggacacggtgctgatcctaggagcgggccccacaggcatctgcactctgttgtgcgtgctgctgaaagcgcctaagcaggtcatcgtctgcgaaaaggacccggcgcgtctccggtttgtccgggagcactatccccaggtgctgacggtggggccggaggaggtgctggccttcacacaggcccacagcgaccacggcggcgcggaccgggtgctggaggtagccggggcggaggagaccttccgcctggcctggcagtgcgcccgccccaatgcggtggtgacggtggtggcgctttacgataggccccagctcctgcccctgccggagatgtacgggaagaatctcaccttcaaaaccggcggcgtggacggctgtgacagccaggagattctggacctgatcgcggcgggaaagctggacaccacgcccctcatcacccacactgtccctctgcgggatatcgcggcggcctatgacctgttcgagcaccggcgggacggtgtcatcaaggtggcggtggactgcagcatggcgtgaggacagcaggacaacagctccgaagagacagagaggagagaggcagatggatgatgggatgcagtggctggcgggaacgatcctgtcggcggtgatctccagcgtgatcaccgtgggcttcctgtccgcgcttgtgacacggctgcagatccggatcgaccaccggaataacgggatcaagcgggtctatgccccgggagagcacagccgaacactgaaaaagcagctggcagaggcacgggcgatccagcttctggcattgtccggctatgggttcacccatgcatacagacgcatcctgaccgactgcgtggccaggggcgggacagtggaatacctgctggcgcagcccggaaccgcctatatgaaagatgcggctgagatcgagggcagaggggcggactccatctccgaggaggtcggggagaccctgaagctgctggaggccatccggcgggacgccgcggaaaaggcagggaagcagaaagcggagccgggcagagttctcgtcaggtattttcacacggagatgcgcgaacagctgattctctgtacggatcagagcgggcggcgtacggcctggctgtcgctgctgatcccgccgcttccggcgctggagtgcaacatgatcgagtacagggacgcggaggactgtgtggattattatgaggccgtgaagaggcgcagtgagccttgcccagtcgccgtccccggcaggatgcacggaaaggactgagacaccgggcgcgggctggccctcaccaggctatgcggcggtactcgatggccctgcactggcggaccacttgggcacagagagcgttgtaaaattggagatactgtttcttggcctggcgctgggcgcgctgcttctcctgaaacagccgccactgagggcaggtcttgtggcagccctcccggtaggacggacagccggtttggcagggcagcatgggacattcctccgatctcggatattctccgcccggacacggccggggcaggactctgctgtcagtgtagtctttttcccaacggcctgccaccttgaaatggtaaagcgggggtaaaacctctgcgcaggcggaaaaacggggcttgacaacccccgcggtggcatggtaaagtattggctgttcatcggagggcttgtggccgcagtcacaaagccggataagatgctggggggcgcccggtttcttgtccggcttttttttcgcgcctttccggagttgaggagggacatcatggaaacagaacagacctttacacgggggccgatcctgtcgaccctgctgaaattcgccctgccggtgctgctggctttgctgctgcaggccatgtacggcgcagtggacctgcaggtggtgggcaaattcggcactgcggcggacatctcggccgtctccaccggcagccagatcatgcagaccgtgaccatcgtcatcacaggtctggctatgggcatcacggtcctgctgggacagaagatcggtgaggacaggccggaggaggcgggggcggctgtgggcagcggcatctgcctgtttctggtggtggcagtggctgccacagtggcgctggagctggcggcacctcagctggcaatgctcatgcacgccccggcggatgcctttgacggcacggtggaatatgtgcggatctgctccggcggcgcggtgttcattgtggcctacaaccttttgggcagtatcttccgggggatcggagactcccgggtatcgctgatcactgtgctgattgcctgtattctgaatatcggcggcgacctgctgttggtggggggcttcggcctgaatgtggctggcgcagccatcgccacagtctttgcccaggcaatgagcgtggcgctgtccctgctgctgatccgtggaaagcacttggccttcatactccggcggcaggacatccggttcgacggtgccatcattggacggattctgaaattgggcagcccggtggcgcttcaggacctgctggtgaatatcaccttcctggtgatcatcgccatcgccaattctatgggcaccattccctccgccggggtgggcgtggcggagaagctgtgcgccttcgtcatgctggtgccctctgcctatatgcagtccatgtccgccttcgtggcgcagaacatcggcgccgggctggagaccagggcccggcgggcgctgctgtacggcgtgctgtcctccctgatggcgggcctcctcatgggctgggcggcattctttcacggagatgtgctggcgggtattttcgcggatgacccggcggtgatcgccgccgcctgggagtatctcaaggcctacgccattgactgcctgcttaccagcttcctgttctgctttgtgggctttttcaacggctgcgggcagacgctgttcgtcatggcgcaaggaatggtcggggccctgggggtccggctgccggtggcgctgctggtgagccgggcggcggacagctctctgttccatctggggctggccacccctgcctccacggtggtgcagattttcctgtgcggaatctggtacctgcggcgctcccaccggctgaaccggctggggctgatacggaaataaaagatgccccggcaccttcgtgccggggctttccagcgtgcctgtccgcaggcagcgggacggaatcattggagtgcaggacagaagacctgcacttgtccctttgctggacaggctcagtagttccgctccatctcctggatctgctggtacagccagtcgttgacagggacggaaatgccgtgtttggcggccagccggcgaatgatgcctgcaaacagctccacttcgctcttccggtggtttttgccgtcctgccgcatagaggtctcaccgttggagggcaggtggtcaatgatgtccacccatgcggccacgtccttctcagagagcgggacaccctctgcattggccacggcggccacctcccgcatggcgccgatcatggtgtcccggggctttccgggcacctgcagcgggccgtaatcgcactggaacaccagggcggcctggttgcagccggtgttgcacagcagcttgctccacatgtgggtgcggatgtccgccggtacgacataggggaagccgatgctgtcaaaaaacgcggtgagccgctggaggcggctggtgtcctccccggcggggacgcctactgccagttccccaatggggtcgcagacgacgcggttgccctccttcttggcggccatccgctccgccacgcaccagaccacatgctccggaccaaaggcatctcccaggatctcctcgctggagatgccattgaggaccgagatcaggagcgtgtccggtcccaccaggtggcggcaggtctcgatggcgttctgcagaccgccgaacttgacggcgaacagcagtaggtccaccggctctgtgcgagcggcggcatcggtgtaattgaagtcgcagggtgcgtcgttgtaccaaaagccctgcttccggtagcgggcgatccgtgcgccgtctgccagaacggggacctgctccttgccgagcgcccgtgtgaagagcgtggcgtacaggacgccaagggaacccaggccgatgacgccggctgtttgaatgggtttcatcaatcattcctcctgttcatcaaaacagggcggcggaatgctccgccgcccctgttgcttacgcgatccgagccagccaccgcagatcgtagggctcaaacacgaccttttcataggcgtccacatccaggggcgtgccgtcccagtcggagtggatgtcgccgttctgcttgatgaggatgtcgtagaggatgtcgtaggtgacgccgctcaccgggtccgtctccacgatggtggagtaaggcagcgtcttgtggtatgtcagctccattcccttgtagtcgaaatggaagccgcagcgcatccggcagccgtccagtcccgtgtaccgggccaccttcttcagatcctggaggattttgtccccctcctcctcatagaggttctccggtgtggtggcggtgtagtcgaaccggaactgaatggaggcgcccgggagcttgcggaaccgctccatatagggcaccagctgctcggcgggatagttcttgtacagcacgcagttcacccggaagggcaccggcagcttggaaagcaggccgtcgttggattccaccacatagtgctgcatgtggcgggagacgttgatgcaggtgatcttgtgtctgttccgctccgcaaatgccagaatgtccgcctcggactggtgctcggagacgggaagggtggtgttgatatataccttgtgggtagtggggattttgtccagcatcacctggagggactccaggttggcgaagggctcacccccggtgaagacgaagtcgcagtcgggcgtgatggcgtccatccgctcgatgctccggcagatcttctccagggaaaaacctgtcatatccgcatactcgcctttattgatgcagaaggggcagtggttcttgcagtcgtaagggacaaagatcgtcaccgtggcgccgccctcccgcgtcttatagggatgtttcatatcgatcggcctttcagagtaaaatggaaaatccgtgaaaaaatggtctccaaaaaccgcgttgaaggtcttgcagacaatgttatattttaaaggatttttcaacagaggtcaagagtaaaagggaaattccccgtgagaaactccgaaaaaacgctgacacttctggaaaacctgcacaaatcccgcctgcagcgccgccccagtggaaagatgccggtgaaggcagggctgtacatttcccggagaaaatgctataataacaaactatgcaattgtgtttcaagagaggaggcggacccatggagattctgcaggggctgctggacaacctgacggccctgctggcggcacatccgctggcgggggagtggtatatggcctttgtgcgctttctgtttccggctctggccgtgctgatcctgtaccgggcggtccgctctctgctgcggattccccacacgccggagaactggggccagctgagcctgccaaacggcacgtccctgcccctgacccactgggagaacatcctgggccggagcaagacggcggacatctatctgaactatcccagcatctcccggcagcatgccgccctctgccggggcgaagatgagaactggacgctgtacgacctggggtccaagggcggcacggcggtgaatggggagaaggtggcgtcctccgttcccgtgaagctgggggataccatcactttagggggcgtgccgttgatcttcctgcctcagaccgtggcggagcgggaggagcaggaggcgaagcgccgggcggagcgccccgccgccatctggccgtctttcctgtggctgacggtgtttcaggtgctggcctgtctgcagctgctcgtggccgccgggactgaggccaccatcgccatccccctggccttcctggggctgacggtgctgatgtggctctattacgcggccctgcgggccactcgctgcgtgggctttgagatggagaccatcgccttcttcctctccacgctgtcactgtccatcactgcctccagtgcccagagcagtctgttcaagcagttcctggctattttgctggggctggcgctgtttttggtgctgggactgttcctgcgggacctcagccgggtgcagaagaaccgctggctcatggcggccgccgccatcggcctgctgggcatcaccctggtgatcggcaactccaaatacggcgccgtcaactggatctccattggcggcatgtccttccagccgtcggagatcgccaagatctgctatatcttcgccggcgccgccacactggagcggctgttccacaagcggaacctgaccctcttcatcgtgttgacaggcgtgtgtatcggcctgctgggcctgatgagcgacttcggcaccgcggccattttcttcgtcaccttcctggtgatcgcctatatgcggtccggggatttcgccacactgtctttgatctgcggcggcgctgtgtttggagcgggcatcattttgaagttcaagccctatatcctcagccgcttcgcctcctggggccacgcttgggaggccgcctccaccaccggctaccagcagacccgcaccatgtccgccgccgcctccgggggccttttgggtatgggggccggcaacggctggctccataacgtggcggcggcggacacagacctggtgttcggtatgctgtgcgaggagtgggggctgctgatcgccgtgctggcagtgggcgccatcatcacgttggcgtttttcgccgcacgggcctgccgggtggggaggtccagcttttacaccatcgcagcctgcgcggcatcgtccctgctggtgtttcagacctgcctgaacgtgttcggttccgtggacctgctgcccctcaccggcgtcacgttcccctttgtctccaacggcggctccgctatgatgtccgcgtgggggctcctagcctatctgaaggccacagatacccgggagaacgccagctttgccatcgcccgcaagcaccagcggcgcctgacccaggcggcccgccggcgggtggagccgataggggaccccttcggcacggaaaaggaggaacgccatgaagaaaattgagcggcgggcctttgtctgtctggcgctggcgctgctgctggcggcgggcctgggattcttcctggtgaaatacttcctggacggcggcagctgggcgtcctccgccttcaaccgccacctgtacaatagcagcggccagcttgccagcggcacggtgctggaccgggacggggacgtgctctccgaggtggtggacggacagcgcacctattacgacaatgccaccgtccgcaaggccactctccatgcggtgggggacctacagggtaatatcggcaccggggccctgaatgcctttgccgacaagctgaccgggtacagcctgctgaacggcgccttcggcgcccagcgggggaacgacctgtatctgaccattgacgcccggtataactataccgcctatgaggcgcttggcggcaagtccggcaccgtggcggtctacaactacgaaaccggagagattctgtgtatggtctcagcccccagctacgaccccctgaacgtgccggaggacatcaccaccaacgaccggtacaagggcgcctatctgaaccgtttcctatcctctactttcacgccgggatccgtgtacaagaccgtgaccctggcggcggctctggaggatatcccagacctggcggatcggacctggacctgctccggcagcgtccagatgggggacgagaccatcatctgctccggcacccacggggagcaggacatcgcctccgccttcgccaacagctgcaacgtggccttcgcccagatcgcccaggagctggggccgggcactctggagaagtacacggagcaggcgggcctgaccggcagctattccatcagcggcctgcctacggcaaagggctcctttgactttgacaacatcaccgacggtcagctgggctgggccggcgtgggacagtaccacgaccaggtgaacccggcggcgctgatgatctacatgggcgccatcgcaaacggcggcaaggcggcggagccgtatctgatcctccggaccgagagcgccctgggtctgccgtccctgccccacttcaccaccaggaccggcacgctgatttctgccgatacggcggctgcgctggcggacctgatggccaacaacgtgacccagacttacggcgccagccgctttcccaatatggacatctgcgccaagtccggcaccgctgaggtgggggagggccagacgccccacgcctggttcgccggcttcctccgggggaggagacgccttacgcctttgtggtgctggtggagaacggcggcggcgggtcctctgtggcgggcggcgtggccgccaaggttctggatgtcatcgtcaacggatattgatacgaaagcgggagcaagatgaacgacaagagaaagggtctgctgtttcagaccaagaaacagatgaacaacggagctatcgccacggggttgggattcgtgctgtacctggccctgctggcgatggggctggagctgccggcggacttggtggccgttgccttcggcgtggtgggaattttcaactccttctccgtgctggaggggcggcgcaaggacaaggagaatatctcctacaatctgctgtggggacagctggcgctgaccatcttcctggtggcctgcgcggtgctggccgtcaagcagcggctagggctgtaaaaggaaaagcggcgggaatccatcggattcccgccgcttttttcttattcggaaacggtctcctcttccaaagtggggggacttccaccggcgcgggcgcgccctccggcagcagctggcgcttgacctttttcatggcccacaggaaacagatcacgtggacgccgaaggtaatagcccagctgatgggataggaccagtagatcgtctggatggtgtggaactggggcagctgaaaaatggtggcgatccacagcagccgcaggccgcaggcgcccaccagggacaccagcatgggcatgatggagtagccgatgccgcgcaggccgcccaccatcacgtccatcatgccgcagagggcataggtggtgcagacgatgcccatccgcaccaatccggcctcaatgaccgggggactggtggtgtagatggacagcagtacccgacctgccagcgtggcggcgttgcccagcaccagccccaccaccagcacgcagccctgggcgcggatcatgatcttgcggatgcggtggtagttaccggcgccgtagttctggctggtgaaggaaatggtggcctgatacatggcgttcatagacacgtatacgaactgctcaatgttggccgcagcggagttgccagccatgatgacctcaccgaaggtattgacggaggactggatcaccacgttggacagggagaagagaatcccctggaatccggcgggcaggccgatgcggaggatctgccgcatggcctgggggtggagccgcatcttcttgagatccaggtgcagcgggccggtatccttcaccatgcagcggagcaccagggaggcggagatgcactgggagatcacggtggcgatggccacacctgccacgtccagcttgcagacgatgacgaagaagagattcagcacgatgttgacgactcccgccagggagaggaagtacagcggccgctgggtatcgccctccgcccgcagcagggcggcgccgaagttgtagaccatggtggccgtcatgcccaggaagtagatccgcagatacagcgtggccagatccaacacgttctccggggtctgcatccagatcagaatggtccgggcaccgaagacgcccaccactgtcaacaccaggccgctgatgatgctcagtaggatggaggtgtggactacccggtggagcgcgtctctgtctcgggcgccgtagtatttggccgccagggtattggcacccacggccagacctacaaacaggttggtcagcaggccgatcagcgcggtgttggaccccactgccgccagggagttgtccccggcccagcggcccaccaccacgatatccgccgcgttgaacagtagctgcagtacgctggagcacattagcgggatggagaaccgcagcatcttggagagaatagggccgttgcacatatcgatctcataatgagtctgctgcttgcctgccatgtcagaaaacctcgtatatgtcccagaatttgcgctgtatgacgcaagccatattctagcacggagcgtctggaaatgctactggtttccacgaaaaattttacacgattttaacattggaaattctcaaaaagctgtgccggagagacaaagcctctccggcacagctgaattgaaaggaaatgatcttagaaggcaggtactacggcgccgtcgaaggtctcggtgatgtagtcccggatggtgtcggagtggagagcatccaccagggcctgaatagcctcgttgttctcattgccctccttcaccaccagtacgttgacatagggggagtcgctggactcgatggccagagcgtctgtggtggggttcaggccggcgcccagggcgtagttggagttgatgacggccagatccacgtccgcaagcacgctggggatggtggcggcctccagctcctggaactccagattcttgggattgtccacaatgttgttgggagtggcggtcaggttggagctgtcgtccagggtaatcaggccctgggcctccagcagcaggagggcgcggccctcattggtggcatcgttgggaacggcaatgacggcgccgtcgggcagatcctccagggaggagacccggcccgcatagatgcccatgggctcgatgtggacgccggccacgctcaccagatgggtgccgcgggtctcgttgaactcctccagatagggcaggtgctggaagtagttggcgtcctcgtcgccgtcctccacggcggtgttgggcaccacgtagtcgctgtactcgttgaccaccagctcgatgccctgctccgccaggatgggcacgcactggttcagaatctcggcgtgggggtgggagaggcggccaccgtcagggtgacggtctcagcggcatcgctgccgcaggcggccagggacaggcacagggtcaggcccagcagcagggccagcagcttctttttcatgtttcgttcctccaataaaatatcgtttatgatgtatttcaaacgcttgccggattttcaagagacaaacgatgaaaacgccgggggtcacttggtatgggcaaagcggggcaggagatcgagggggccggattttttggcgccggacggctggtccagccgcttatcgatgcgccgggacagccagttgaaaatcagctggaccacctgcaccaggataatcaggaacaccaccgtcacccacataacggaggtgatgccccgctgatggccgtaccggacggcgatgtcgcccaggccgccggcgcccacggtgccagcgatggcggtataggccagaatcgtcaccagggagatggcgccccccaggatcaaagagggcttcgcctccggcaggtacaccttccagacgatctggagggtggaggcgcccatggactgggcggcctcgaccacaccggcgtctacctcgttcagggaggtctccaccatccgggcgatgaagggggcggcggacaccaccagaggtacgatggcgcctttgacgccgatggtggtgcccaccaccatccgggtgaagggcataatggccaccatcagaatgatgaaggggacggaccggccgatgttgacgatccagtccagcacccggtagacgccccggtggggccggatgccgtggggctgggtcaggatcagggccacccccagagggaggccgatcagataggcgaatgcggtggagatcaccaccattaccagggtatcccagacaccatctgtcaacacattaccgtattcggcccagaaggctgcaatagactcaaacatggtattccacctcctccgcagagacattgggctgcgcccggatatagctgagggctttggcggcctcattggggttgtccggcagcccaagcagcatggtgccgaaggccctgccctcgatgttgcgggtgtcggcacccagaatattgaccttcacccccaggtcgatggcgagagacgcgatcaggggctgatacgccgtaccgccgttgaaggccacgcggacggcgtgagtacctgccggatactgttccaggctgacgccaccggggtacaccagccgccgggccgcatccgtatggggattggagaagatgtcctccaccttgccctgttcagccaccacaccgccgtccaggatcgccacccgggagcagatctcttcgatgacgctcatctggtgggtgatgaccaccacggtgaccccaagcttctcgttcaggtccttcagcaaggccaggatggaggcggtggtggtgggatccaaggcggaggtggcttcgtcacacagcaggaccttggggtccgtggccagggccctggcgatggccacccgctgcttctgtccgccggagagctgggagggataggcatccgctttctcccgcaggcccaccaggtccagcagctccagggcccgctttctggcctgggcagcgggggtaccgctgagctccatggggaagcagacgtttttcagcaccgtccgctgcattagcaggttgaagctttggaagatcatagtgacgttccgacgggccagccgcagctctttttcgctaagggccgtcatatccttcccgtccacgatcacggtgccggaggtgggacgctccagcaggttcatgcaccgcaccagggtgctcttgccggcgccggagagaccgataattccgaagatctcccccttctggatgtccaggctgatgtcctccagggcatggacggcgttttcacccgttccaaaggtcttgtacaggtgctgaatttgaatgatagacacgggataacgctcctttccggtgaattctggcaataaaaaagtccttgagacaaaagtctcaaggacgacggaattcgccgtggtaccaccttgattcgcacgcttcctcacgaaagcggccttggggagtgcaaacacactcctgcgctgtgacgtgcgcccacgtcgtgacctatgccgggacggcggtcggccacgcaactccgagaccatgttctccaagcccttccagacctcttctcaccacacgaggctctctgcgctgtatctgcctgggtactcttctcttcatcgtcttttgctatcaggttattcaataactgtctcatagtttatctgataacaccggaaaagtcaacagggcaacctgcatagaaatccaggcaaaagacatgtggttctgtgagtttccacaaagcggcgtcgggcgctgtcgaaaccgggaattttttcaagagaagaggcagtatcggattgcaactgctgggcaaaactgctatcataaaatccacaagacccaggaggatggaggaacggcgttgaggcggaagcgggatcggaattttggcatacgctggctgcgggacctgctgtgcggcgtcctgatcggggccggcgccatcctgccgggggtttccggcggggtgctggcggtggtgttcgacatctaccgtccctttatggaggtgctgacccatccccgggaggccatccccaaatactggcggtggtttctgcccatcgggctggggtgcgccatcggctttctgggctttgccaagggcatcgccgcggccatcgacgtgtccagcaccgtcactacctggctgttcatcggcctgatcgtgggcacggtcccatctctcttccgggaggcggggaaggagggacgcagcatcggctcttgggtcagcatggcggtgtgcgccggcgccatcttcttcagtctgttttacgtaggaaaagtgatttgcgtcaccgtggaacccaatttctggtggtataacttctgcggcgccctttggggcatgagtctggtgattccagggctgacctcctcctcggtaatgatggccctggggctgtaccagcccatgctggaagggctggcccggctggacttcctggtgctctccgcctgcctgccggggatggtgctgacaatcctgctgctggcaaggctggtgagctggttcttccggaagcactactccatcgctttccacgggatcttcggcatcgtgctggcctccacattggttatcatccccaccagttatgtgggcgcgtgggagattgtgctgtcggcggtctgctgcatcggcggctttttgctggcctacttcatggcccggctggaccggcggatccaggagaacggcagggcctgaaacatgaaaaaagtcccctctgtgttccggcacagggggactttttcattacagatcgaacacgcccatgatggcaatgcccgccacgatcagcgcgatcatggcgtagtgcttccaggagagcttctccttcaggaagatccggctccacagcacggaggccgcgcagtaggaggcgatgatgggcgcggacatggccagatgctccgtgtccgcgatggcgtagatgtaggcgaactgtccagcggtctcgcagacggcgcccagatacttgggggcctccatcttcggcaccagccggtcccgcttgatgagcaccacatagacgaagcacaccacggcggccagcaggaacgtcagctcataggccacgttggcgctggcctcgtagtcctccacggtgcggctgatgatctccagcacccggctgtcggcaaaggtgccggcagcgtccagcacgcagtaagccgcaggcatggccagggccatgaagctcttggtgtacttgtagttgcttgccttctgccgctcgatgcgcagttcgtcatcctcccgggcctccaccacacccaggcccacggcgcccacacacaccagcgccacggcgaacagggccaggggggagtatccggcgatgccgtcaaagaggatagccagcacagctaccagggcgccggaggagttgcagataggggaggagatggacagctcaatgtaccgcaggcccacatagcccatggccatagagagaatgtacaggatcgagacgggcaggtatgtcaggatgatgtccagattgatgaccgtaccgcccacaaagacctcgtaggccgcgtgaaggcccatgacaacgcccacggccatcaccattttcaggtggctgtacttgtcccgggcatcgcggcagccgattttggaaaagaggtcggagccgctccagcagagcagcgcgatcagagagagccaaaaccacatattacgtttttctcctaaatcactgtattcaaagcgttatttactttccggcagagttaccagacccgcctccaccagcttctggagggacatgaggattcccaacttggcgtggtaccaagtgaggccgccctggaagtagacggcgtaagggggcggatgggcccgtcggcggagagctcgatggaactgccctggacaaaagcgccggcggccatgatgacgtcggagtcatagcccggcatggcccagggctccggggtcacgtagctgtctaccggggcggcggcctggatccccttgcagaaggccaccatggcctcggcactgcccagggtcaccgcctggatgatgtcatggcggctctccgtggcgttggggacgcaggcgaagcccagcttctcatagatgttggcggcaaagacagcgcccttcaaagcgccggacaccaccgtgggggacaggaacagcccctggtagagggcgggcatcagacccaggttggcacccacctcttgacccagtcccggggcggagagccggtaggcacaccggtccacgcactccttggtgccgcagatgtagccgccgatgggggcaagtcctccgccggggttcttgatgaggctgcctaccaccatgtcggcccccaggtccgagggctcgatggtctccacgaactcgccgtagcagttgtccaccatgattttcacgtccggcttgatccccttgcagaaggcgatcagttccccgatctgccggaccgagaaggaggggcgggtggcgtaccccttagaccgctggatggtgatgagcttggtgcggccgttgatcttctcccggatggcgtcgtagtcgaaggttccgtcgggcttcaggtccgcctgggcataggtgacgccatactccttcagggagcatttgctctcccggatgccgatgacctcctccagggtgtcatagggggctcccaccggggacagcaactcgtcccccggcagcaggttggcggagagggccactgccagggcatgggtgccgcaggtgatctggggacggaccagagccgcctccgtgtggaacacatcggcgtacactcgctccaggttgtcccggccgtcatcgttgtagccgtagccggtggtggcggcaaagtgggtggcgtttacccggtttttctgcatggcggccaggaccttgccttggttgtactctgccgtctgatcaatgacgtcgaaccggggccgcaagtcccggagcaccgcctcgccgtattcatagaccgcccggctgacgccgagctgttcatacatggtcacaatttccatggtcttcctccgttgttcccaaaatttcatctgccaggtcgctgaggacctggggctttgtcaccaccaggccgctgacctcattgcccaaaatcagcagggtgtctccgggagagatgccaaagaaccggcgggcctcctgcgggatgacgatctgtccccggtcgcccactttggcagtgccaaagacccggtttttggacatgcccagcatgtgtttgcctccaggcatggagctacctccttgaaatcatacttttcacacaagtgtgaatcatagcacaaccggaagaacttggcaagaggaaatttttcaaaacggaaaatggtgcaaaatgctttggagtgtgttatcatacctccaaagatcaaaatgaggaggagcacctatgaattggcggacggtggacatgtcccgggagtcccggcgggaccaatttgcgtattttcagaccctgtccaacccctatgtgggggtgacggtgcaggtggatgtgacggagctggcagtctggtgccgggagagaggaacgagcttctttctggcggtgctgtacgctgcggtccgagcggccaacggcgtgccggagctgcggcggcgcatccggggcgatcaggtggtggagtacgaccgctgcccctcctcccatacggtggctctgccggacgggacctactgctactgcagcctggaggtggaccggcccttccgggagttcctgccctacgcggcggcggagcaggagcgggtgaaggcggcgcccaccctggaggacggagaggacggggagagcctgttctttgtctcctgtgtcccgtggctgtcctacacggccctgacccagccaaccccaacgccggcggacagcaatccccgcatcacctggggccgctggcaccgacaggagggccggactctgctgcctatgacgctgctggccaaccatgctttggtggacggcatccacatcgcccggttctatgagaatctggaccgggagctggccgccctctgcggcggggagaaaacagagtactgaatcaggaaaggagagagcggcaggtgaggcgctgcattgtggtggccgggatcgcatgaatcaaatttgaaaggagaatttcctcatgcagattccggcgaataccatctatccccgcacaggcgaccgggagaccgtctatctgaatgcagtggtgtcagaccccaatatttctgtggggattacacgatctacaacgatttcctccgggaccccacggaattcgtgcgcaacaatgtgctctatcactaccccatcaacggcgaccggctggtgatcggaaaattctgctccatcgcctgcggcgcgaaattcctgttcaccagcgccaaccacacgctgaagtccctgtccacctatccctttcccatcttctacgaggcgtgggacacgtctgtctcggagatcacggagacctgggacaaccggggggacattgtcatcggcagcgatgtctggatcggctatgaggccgtcatcctctccggcgtgcggatcggtgacggcgccatcgtggccgcccgggcggtggtggctggggacgtggagccctacaccatcgtaggcggcgtaccggcgaagcccatccggaagcggttcacaccggagaccatccaccgtctggagcggctccggtggtgggactggccacgggagaagctccagctgctgctgcccctgctccgccggggtgacctcacggcactggagcgggccgcggagaaattctaatccacacaaaaaccgggcggcacacaactgtgccgcccggttggatatttactcttaaaacttacacctggataccgcccacaaaataggtattgtagtacccgctggtcaggctgctgacgatgacaccgccgctgcgggaagaggaggagtggatgaactgcccatctcccgtgtagataccggcatgggaacatgccttgccggcgttgcggctgggatcgttgaagaacaccagatcgccgggctgcagctcggagatagagtatacccgggtgcccaggccactctgccactggctggtggcggagtggggcagggagtagccgtgctggctgtacacgtacatggtgaagccggagcagtcaaagccgcggggagaggcgccgccgtacacataacccgtgcccaggtactgcttggcggtggccgcgatgtcgctgttggaggaggaagactccgtcaggtccaggaagtcgctgcggatgtaaccctcggtgccgtactcacaggtgacgtcgtaccagccgtccaccaagccgttgaccgtgacgatggcgtcctcctcaatggtggccagcacagagctgtcggtagaggcgtcggagcggacgttcacgccgtcggaattgacgcggccgtatgtagtgaagacattgtcctgatctacgttcaggtagtcagcagacacatagccggtgctgccgttgtaggcgatcttgtaccagccgtccacggagtcatccaagatcgccaccgccacactcttgtccagcgtggtgaccacggaggcggaggtagagggctcggcccgcagccgcagggaagaacctgtggtgcagccggcgccggtggcgatgtccgctgccagggcggtggccgccagcagcattgcggtgagaacggagaggaacaggaccttgcctgctctgcctgcgaagtgcgtcataggtgtacgttcctttcgtcagtcttttgtagcgcggggaaaaggtcctgtttcttacagcttgccagcaagagcacgatccagccagacggtggcgatgtccatcgccgcgtagaggctgtccttctcgctcttcttgaccacacggtcccgggacttcagctccgggtccgtcagctgcagctggatggagaccttggtggccacctccatgtcctgctccttcttggtgttgaggatctgcatcatgatgatatatttctcagccatcgtgccgtagtagatcagattgtccacccggcgaaggggatggcccttgtatgtcaaaccttctgccttcttggacttgctctctgccatggaaacactccttcaaaagttgtaaccgaattgtaacagattttatccgctttgtcaacgtttggtcacaagaaattacagccaattcctgggaagagacctgccttcggccctggacgcaaaaaatcccgcagggaaggtcgccgcgccattcgcacggatgccctctctgcgggggaatgcagaaggaaaacggttactgccccaaatatctgcggaccagcacctgcagcagctcgtcccggtcgatcttgcggatcagggtccgggcattgttgtgattggtgatgtaggtggggtcctcggagagaatataacccacgatctggttgatggggttatagcccttttcctccaatgcccgatagacggtcgagagaatctgatggatctctgcgtccttctccgtggcaatattgaatttcctggtaaaatcgtccatacagacaccacctttcccgaagggagcaccacttcataatacaaaactagtatactcgttttttgaaaaactgtaaagcgttttccgcatgaaatttgaaaaatacgccccgtaatcgctgggagggcgctggaccgaaagaacagggggtccagtgcagcagaacggccttcggcccgcctcacagcgcctccgggagcggcgtctgcatcggcgctgctgggggattggatttgagccgggcggaacgcatccgcccggctcaaggtttctgtctgcgcaatagcacctggacgcgacggcacacaagcccgctgtgcagtccgcaggcggccgcatattaccgcaggacggcgttcagctctgccttcagcgtctccaggatgctcttcacatcctcatcggcctcctgagcggtgaggctgcggtcgtcggagcggagcgtcaggttgaaggccacgctcttcttgccctccgggatgccggagccggtgtagatgtcgaacagggacacatccttcagcagccccttggcgccccggcggatgcagtcctccagcgctcccacggtgacggccctgtcgcacaccacggcgatgtcccgggtgacggcggggaacttgggcagggggacatattccgggtcggcccccttggcattctccagctcgtccatggccagctctgcgcagtagaattccgcgtctacgccatagttcttggccaccagggatggatctggccgaaccagcccaggcagtcgctgccgctccacacctcggcaaagcggccggggtggtaggagagctcctccggcaggccgctgccgatgcggaaggtcacatccttcacccgcagttcctggaggatcgcctcaatggcgcccttcatagcgtagaagtccatgtcgccgccgtaggcgcccagggtcagtgtcttggactcgatggccaagccgtcctcgccgccgggcaggtacgtccggcccacctcatagagcttcacgtcctgattgcggtagttgtagttccgggtcaggatctccagcatggagggcagggtggtggtccgcatgatggaggtatcctccccagggggttcaggatcttgaaggagttccgccgctggtaatcttccggccagcggatcttgtcgtactgggtcggggagatgaaggagtatgtgatgatctcatcgtacccgaaggcccggcacacgctggacacccggcgctccaggatctcggcggcgccatagccgcccagggtggtctggccccgcatcagggtggtggggatgttgttgtagccgtagaaccgggccacttcctccgccagatcggcgatgccctccacgtcgccccgccaggaggggatggtcacgtcggcagggccgccggggcagctgtcgtccgctgtgcggatgtccacccgggccagataccggtactgctccgctgcggggatgtcggtgcccagcagcgcgttcacccgctccgggtccatgcggatggtgtggggctggggcacgtagttgaggatgtcgatgacgccgtccactacctctccggcgcccagcagctccaccagctcgcaggcccgctggacggcgggcagggtattcaggggatccagacccttctcgaacttggcggaggcctcggtccgcatccccagggacagagcgcccttgcggatgcaggtgccgtcgaagcaggcggactcgaacaccacgtcggtggtgtccgccacgatctcggagttcaatccgcccatgatgcccgccaggcccacggcccggtgctcgtcggcgatgaccaggtggttggcggtgagcttgcgcacgttgccgtccagggtggtcagttcctcgccctcctcggcccggcggacgatgatgtggccgcccttcacatagcggtagtcaaaggcgtgcatgggctggccgtactccagcatcacatagttggtgatgtccacgatgttgttgatgggacggacgcccatgctccgcagccgctcccgcatccacttgggggagggggcgatcttcacgttccgcaccatccgggcggtgtaccggggcaccagatccgcggcaggggtctcgatgtccagcaggtccgtcagcacgccgtcggcgccgccctgtacctccggttcgtggagagtcaggggctgctggtaggtggcggccacctcccgggccagaccgatgacgctgaggcagtcggggcggttgggggtgatctcgaactccaccacatggtcatccgcgccgataatgggcttgatgtcatcgccgttctggatcccttcctcgtggaggacgaagatgccgtcggggatgcagtgggggaactccttctggtcggcgtggagatcctccagggtgcagatggcgcctgtcttggtgttgtaggccaccaggtccccctcgtggaggttggggcagatggtgtccggcacagcggtggagccgcccaggtccagacaggtgtggaaggtgtagtccggctggctggcgcactccaggatcttggcgcacaccaccggcccgaacaccttgtcaccgggctggatgtcggcggggatggagggcttgtccttgtccagggggtggtagtcgttcaggatggcggcggggacgatagcggcgtaggggaagtcccgctcatccagacccagctcatagaggccgcacatcatgccgttggactccacgccccgcagcttgcccttctcgatcttcttgccgccggggagggtggagtggtccagggccacgggtaccatatcgccggggtggatgttccaggcgccggtgacaatctggatgggcgcgctctggcccacatccagctggcagatccacatgtggtcggaatccgggtggcgctccatggtgaggatggtgcccaccacgatattggagatctcggctccccggtcctcggtggtctccaccttggagccggagagggtcatggcctcggcaaagtctttatcgttggcgtcgacgtgcacaaactcgtccagccactttctgctcagtaacatatcttctataactcctttatatcggaatgcgggagtgccccgcaaaagcctcgcagagtttcacgccgccggcgtgaaaaaatatccagtcattttcggaaggacacgtgcctgccgaaaattccctgactcagccgccttgggcggcgttcaccagtgaccgatgtcactggtgagggggaatctaaagggggacgggatcccctctttaagaactagaactgttccaggaatcgcacgtcgttctcaaagatcagccgcaggtcggcgatcttgaaccgccgcatggcggtgcgctccaggccgatgccgaaggcccagccggagtatacctccgggtcgatgccggacatcttcagcaccttggggtggatcatgccggcgcccagcagctcgatccagccctcgcccttacaggtggggcagcccacgccgccgcacttgtggcactggacatccatctcgcaggagggttccgtgaaggggaagtgatgggggcggaaccgggttttggtgcccttgccgtacagcatctccaccaccgtgttcagggtgcccttcagatccgccatggtgacgcccttgtcgatgaccatgccctccacctgatggaacatgggggagtgggtggcgtccacctcatctttccggtacacccggccgggggcgatgatgcggatgggcagctccatggtctccatggcccggacctgcatggggctggtctgggagcggagcatcacccggctgtcctcgtcaaagtagaaggtgtcgctccagtcccgggaggggtggccctcgccggcgttcagcttgtcgaagttataggtggccagctccacctccgggccgtccaggaccgtgaagcccatggagatgaagatctccttgatctcatccagcgcggtgtacatggggtgcttgtggcccagcttgtgggccttgccggggacggtgatgtccagcgcctcggcctccagccgctcctccagggccttttccgccaggacggcggactgctgctcgatggcggactccacatctgcccggacggcgttggccagctggcccatgacgggccgctcctcggcggagagcttgcccatctgcttcagaacggcggtcagttctccctttttgcccaggtactggacccggagggcctccagctctccggtgttcccggcggcgccgatggctgccagcgcgccggcgcgaatggcttccagttgttccttcatacgtcagactccttttttgagttaggagcgtggagatcggagataggaactggggcggccgctgtgcggctctattgggatcatccggctttgccggataccaaaactcctatcttctatctcatatctcctatctttgtgataacaaaaaacgcctctcgtcccatccctgggacgaaaggcgaatccttccgcggtaccacccggattcgcgccaaaagcggcgcgcactcgtggccccggtaacggagggcggaccggccgtgtctccacggcggctcccgggcgaaccaaaccgggcgtccgcagtctggcttgcagccggtggccagacctctctcggcggcgtatcacggttattttcccgttcatcgctgataacaattaacacttatagcacagaaacgggacaaatgcaagccccgattcgccgaaattcagcggatcggggcggaaattttcagctcaagagccggccgtccaccaggtcctccacctggatggcggacacctcgccgtccgtgatgaaaaaggagatgtgcttgcagtaggacaggccgccgggctcgtggatcagggcgtagtcggcgccgaactggtcctcgcccaccgcctccatctgcaccgcaccggtgtagacggcttttacatcgtcctccgagtcccccacctggatgcctcccagggtccgcggccccggcaccgtggtggtcatgcggtagatattgtcggttccatccgcatccagatacgccacatccacgcctccaaaggaaaacgtgaagagcgattccccgttgtcccccgtcccggcggactggggcgtctccgggagaccctcatagtcccaggggtatccgccctctttgcgccccagggagaggaactgcccctccgtcaccagacagaaggaggcggtggcgttttccgttgcccgctcgatggcctggggccgggcctccttcagggcgtccagcagggcctgctgggcgtcgttttccggctggtaggtgtccaggatctctgtcagccggtcctgctcctcctgaccataccaggcgtaggtgtcgttcaccggggcggccaccacaatgtcggcgtgctcccaggggctgtccgggaagacggacaacgcatcgaaccaggtgtccgggtcctccaggaaccgcctggttaaatagtcggtggcaccttcggaataagctccgtccgcgtggagcagccagcaggccagcttcaggtcggaccaggtgtcgaggttaccggcgtcatcacgcatgaaggtatcaatatcataggtgaactggaacaccgtctccgcctccaggtccagcccgtcggagggaacaaaggaagtgaatttccagccgtccgccgtgtgttccagatccagcaccgcctgggagtagccgacggtggtactgggtttctcaaaggcccagctgtcggcgtagaaggtgaccgtcaccgtccagtggtccgcatccacctgctccgccgccacggtcttgtccagcaggtacaggttgctccctcggcccccgtcggtggcgtagagaacgccgtcgaagtccttgtagtgatccggggacagggcgaagaggttgtccacaatctccggggagaagtaggactccgccgtctcccgcaggtctgccagggacgtgatcgtgaccggctgcggctgccagggaagcgcactgtccgtgagctctgccacggtagaaacgggcagggagagattctccgcatccacccggtagtaggtcaggtctccctctgtgcgggcgtcctccatgtccaggggcagggtggtcagatcaaaccagtcgtataccgccgacgcggcggtatacatattgataacgtcctgttccgtcagagcggtctccgggcctcatcgggcgaaaccggagattcccgcccgccgcagccggcgagcagcgtgatggtcaggagaagaagcgccccaaaacgcctcatgggcagcgcctcctttcgttcctttttgaagcatcatatcacattccaccggaaaattcatgacgatctggttacaaatgattgcaatccggagcgggaattcctataataggcaccagaaaaccatgaggaacacaggaggttacggccatgaagctgacgacggcggagcagatgaaggagctggaccggcaggccattgaagagcggggcattccctccatcgacctgatggagcgggcggcggcaggcgtggcagaggcggcgctggcgctgctgcccaagcggccggggaaatgtcgggggcggccttgtgcggcgcgggcaacaactgcggcgatggaatcgccgcagcccggctgctgtttttgaaggggctgaaggtccgggcgttcctggtaggggactatgagaagctgacgccggacgccctggaggagacccgccgtctcagcgagtgcggtgtggagctggagcggttcgacccggcggacgaaagccagcgggcctgggtgttggggtgcgacgtggtgatcgacgccctcttcggcgtgggcctctcccggcccatcggggcaggcacgccctttgccgcggcggtggactggatgaatgagagcagggccgccgtggtggcggcggacattgccagcggcgtgtcggcggacaccggcgccgtgctgggccgtgcggttcgggcggatcgcactgtcaccttcacactgcccaagatcggtcaggcagtgggggagggggccgccctctccgggaacgtggaggtccgggacatcggcatcccggcggatctggtccggggccttgtctgccgggcccagacggtggagcgggactttgcccgtgcggccctgccgccccggagggcggacggccacaagggaaccttcggcaaggtgctgatcgtcggcggcgcagtgggctataccggtgcgccttatctcactgccgcggcggcggtgcggaccgggtgcgggctggtgtccctgggggtgccggagaccatctggccggtggaggcggccaagtgcgtctctgccatgccattccctctgccggacaaacatgggaggctctctcccaaggcgaaagaggaaatcctggagcgggctgccggctgtgacgcagtggctctgggccctggactgggccggggagatggcgtcacggagctggtgctggatctgctgcagaagatccagcagccgatggtgctggacgccgacggcataaacgccctgggggacatatagatgtactggacgcccggcgagaccggatcacggtgctgacgccccacgacggggagttcacccgcatcggcggcgacctcaccggcagcaaccggctgggggccgcccgggcctttggagcggcccatggctgtgtcctggtgctgaagggccaccggaccctcaccgccgccccggcggggaacgtgctggtgaacaccaccggaaattccggcctggccaagggcggcagcggcgacgtgctgacggggattgtcgccgccctgctggcccagggggcgactgccgttcgggcggcggcggtcggcgtgtggctccacggccgggccggggacttggcggcggagcgcctgacgccctatggtatgacgccggaggacgtggtgtcgtcactgccggcggccatcggggagatcctataaaagacggaggtttttgcggtgcgcagatgggcttgcataccaatgatgaccctgtgcctgctgctgacggcctgcggcggcacaggcggagaggcgggggatgcggcggatgcccggatgccctatcggaacatggcgggctgcgtcatggaggcggaggtctcctgcacgcaggacggcgcggcctgggaggccacgctccagtgcgactacgtgccggagggggagaccactgtggaggtcctggcaccggagaccatcgcgggcgtgaaggcagtgctctccgacggggaagtggaactggtgtacgaggaccagtgcctgaacgccgggaacctcagcagccaggaggtgagccccatggcctgcctgccccagctgatgagcgccctgcgggacgggtggctgctggaggagagcgaggaggactggcaggagacgtcctgcttccgtctgacggtggaccagaccggagagcagaatgggaagatcctctccaccctctggctgcggcaggaggacggtacgcccctccgaggggagatcgccgtggatggggaaatcattttgacggcagactttacgagcttttccttttatgatacaatagaaaaccaggaatgacttcggcgggagggttcctcccgccgcttccatagactgacggagaaggtgaccgacacatggaggaaccgattctgagacggacctgggcggagatcgacctggacgccctggcccacaactatcagcaggcccgcagaaagatcgggcccaacgtgaagtatttgggtgtggtgaaggcggacgcctacggccacggggccattcaggtgtcccgcaagctggagcagctgggggcggactatctggcggtgtccagcttggacgaggcgaaagaactccgccgggccggcattcaggcgcccattctgatcctgggccacacgcccccggccatggtgccccagctgatcgagtacggcatcacccaggcggtgtccgccctggccaaggcggaggcgtacagcgccgcagccgtggagagcggcggcacactgaaggtccacatcaaggtggacaccggcatgtcccggctgggtttcctggtgcgggaggggcactttgacacaggcgtggaatccatcgccgccgcctgcgccctgccgggactggaggcggaaggcatcttcacccacttcgccgtctccgacgaggacgacagagacagtgaggcctatacgagagcgcagttcgacgtgttcacccgtgtgctggatgcattggctgcagggggcagaacctttgccatccgccactgcgccaacagcggcgctctggcccgctatccggagatgtatctcgacatggtgcggccgggcatcgccctgtacggcgtgggcgccgatgcgcagcggctggacctgcggccggtgatgagcctgaagtccagcgtctccaccatcaagacctttgacccgggcacggacgtcagctacggtcggacgttccgcacccagggaaggacccggatcggggtgttgcccatcggctatgcggacggtttcttccggggcctctccaaccggatgtcggtggtgacagcccagggcccagcccctcagcggggccggatctgtatggacatgtccatgatcgatctgacagacctgcccgacgtcaaggtcggggacgaggtggagatcttcggccgccgccagcgggtggatgacctggcggccattctgaacaccatcccctatgagctgacctgcgcggtgagcaagcgggtgccgcgggtgtatatcgaaggcggtaaaatcgtggagcggagcctgcggctgctgtgagcgcagggaagcgagccgccgcagcgcggcgtccaagcgttttgccgcgtgcggcaaaaccttggggagagcgggctttgcctggccgaccaaaatgagatcggggtccccgccgcgcaacgcgcggtggggcctgacctgtgcggtgagcaagcgggtgccgcgggtatatatcgaaggcggtaaaatcgtggagcggagcctgcggctgctgtgagcgcagggaagcgcggacacaaatccatacacacacgccttgttccgggcataggatagtgcggggcgaggacgccggaattttgcggcattggcaaagtataaattccgtacctgcgtgggagaatgaaagtggcctcaccgaagggccttcggtgatgggtacttctttcggcggagtgtgaactttgtggatacgagtgtcaagcgcggcgatatttactatgccgatctctccccggtggtgggcagtgagcagggtggtgtccggccggttctgatcattcagaacgacaccggcaaccggtacagtcccactgtgatcgcggcggccatcacttcccagaccgggaaggccaagctgccgacacatatcgaccttcccgtggaccacagctgcggcctgagccgggattcggtggtcctgctggagcaggtgcgcaccctggacaaaaagcgcctgcgggaaaagatgggccatgtggaggagaatgtgatggagaaggtcgatctggccatcgcggtcagcttcggactgccccacgaccagatggtttgagagatccgtttcttcggcaatacacaggccgggcgctgcggcggaagccgtctcctggccgcccggaaatgcgtggtttgatcgaagggtcctcctgaaaagggcgttccgcccttttcaggggtaccgatttttcagatccgacaatcaatacggaggtacataagcgcatgaaaaagaacagatggtatctgcggctgctggcattgctggtgctctgcggcgccttgaacgtgacgattaccgcggcggcggaggccggatcctccgacgacccgctggtgaccctgagctacctgaacgagacgttcatggactccatcatggagcgggtggaccagaagatcgccgcccggaatgcccagttgggcatttcggcaggcagcggagccggtgccgcgtccaacttcactgtggtgaccctcaccagcggacaagtcctcactggggacatcggctgtgaggtaatgctgcgagtgggaacggctgtgtgcgtttctccctccagccccggtctcattgacgagaccgcagccacagcgctgaacaacggcagtgcgctggtccagaaccacctgtacatgatgaccattgagggccggggcgtccgcgccacggccggcaccaccaagctgctggtccggggcagctacaccgtcgcctgatctccgcataaacggccccgcctgggcataggttgtgccaggcggggccgtttggagagggggcagagcgatggacaagtttccactgatgcagggctgtttctctgtgggggagctcatcacggagcaggaggcgctgtacacctggtttgaggcccggtgccgcctgccgggagagggcctctggtgcgcctgggcggtgggcgaccggggagagctgcggctgggcgttctggagccctgtggggaccgggccacaatccggcggcggttttccgcccggctgacagcccctctaggaaagctgcggcagggggagatccgccctgcccatccgccggagccggaggattggacgccgctggagcgctcggcagtgcgtctccgttccccatggcttcgggagcagctgcaccttgtgccgggcgtccttgtccgggaggagcaggggcggcgagagctggcggtgccctatgacgtgggccgcccctttccgctgaccgccttgttctgctttgcccatatccgccgtatccatggccggagctacgccatctttgccttcaacggggaggagcgaccggtgttctgagccgtccggcggacagagacattttcagaaaattccaaatgatgtgttccacatttcccgggggtatgatataataaccccaagacggccgtggcggaggggctctccgcccggcctcagacacgggaagacctgccggccgggcgccggcggagcgtttggaggtccagtatgaagtgtccctattgcggttacagtgagagcaaggtcattgattcccggcccgcggacgaaaacagcagcatccgccgccggcgggagtgcctttcctgcggcaagcgatttaccacctatgagacggtggagagcctgcctatggtggtggtgaagaaggacggcagccgccagagttttgaccggcggaaggtgctgggcggcatgatccgcgcctgcgaaaagcggccggtgcccttggcggagctggaaaagatcgccgaggagatcgagcaggatctgcagaactccatggagcgggagatcagcacagaggccatcggcgaaaaagtgatggaacggctgcgaaacgtggaccaggtggcctatgtccggtttgcctccgtctaccgccaattcaaggatatcgacacctttatgacagagctgaacaagctcctggccgacaaccggtgaaggccgtcagaggacgttcttgatatccagccgctccgtctccgccaggagccggagctgatcccgcaggtccgagatctccgcccggaactccgtcagctcccgggtggcggcgaaggccagggcccggcggtacatggcctccgcgtcgtccaccgtatcatgccgcgccacgatgtggaggtaggtctggctttccgaccagtcgtcatagctgcctgccagcgtatccacggcctcggtccaggcctctgactgggcttgggcgtccgcctgctgcagctgctcccgccagcggacggtgctggcggtcatgtaggagctgttccacagggaaaagaccaggatggctgccaggatgccgacggatattccatacgccctcatgactctcgctcctttcggacgcagaatacctgcccctgttcgtccagggtcaggaggaagatctcgcggggagaggaggctttttcccgggacagctgcttgcgcagccagttctcgtcccggccgcaggcggtcagattgcggtggatgacccgcccgtcgttgatgatgaccatgggcagtgtcacatcatcctccagccccagtcccagttgttccgccgtgggcggctgctgggctgtccagggaaagacggtcagctggccggagttttccagcacggcgtacttcacgtcctcgatgcgggtgacgccctgctcccgcagttcctccatcagctcatcgatggtaaagcggttcttccgcatggcgtcctgctgcagcttgccgccccggatcaggaccgtgggcgtcccgcagatcagcgcccgcagccgcaggctgcggagagacagctgactcagcagcagtgacagggccagcagcgtcaggatcggcagcaggccagagagcagcggaatgccgaagtcctgcatgggcacggcggccaggtcggagatcatcatggtcagcaccagctcgctgggctccaactcgccgatctggcgcttgcccatcaggcgcatcccgaccacaataaggaaatagagaatgatcgttcggacaaaggcggttatcatggcgaaaatccctccgttccgctagtatctgccggaacgggatttttatccgggataaggctcccccaggagggggagattcttgtaaagcatggaaagaaaatatagagttatacagcaacagttttgagaattaataagaaaaaataatgatggattcaagtgttcacaaacaattacatttcaaatcggtaaacgccgaaaaccgcagggaagttgagggcttgactgtcttttctgagcaggctggttttattgagagtgtaagcgagtgcttgcgggaggcagatgaattggagctgtggcggcctgttggtatttatgacagcgacacgctgattggttttgctatgtacggctattttccagagccggctccgggacagctatggctggatcggctgctcattgataaaagatatcagggaaaaggatatggaaaacaggcggtgctttcgcttcttgacagattgcatacagagtatcagagcggcacggtatatcttagcgtgtatgagaataatccccatgcaatcaagctttatcaacagattggtttccggtttaacgggaaatacgatagcaagggggaacatatcatggagtatcatttttgagagatgtagagccagtcaacggtcaatatgtgctgaatcgtcttaacagacctatttaagatgggcttatcaggcgcatattatagtgaccgcatcaaaatcaaaaaaagaaaaatcgcagatgtgaaaggagtttatgggccgcggcccatcacagcgccagcgcccgccgccagcggcgggacgacgaggggaagggagtatcgaaggattcggcggatgcccttccgtgcccacgggcgcgtacacagccggcaaatatgcgggcaaccgcaaaacaagggggctgtgaccgtgaagaaagtgacaaatgactgcgtgtttgtccttttgaccattcattacagaatcttcaggaggattatcgaatatgtgcggaatcatcggatttgtaggaaacgagcccgcggcccccattctgctggacggcctggagcggatggagtaccgggggtatgactccgccggcgtggcggtgcggtccgagacggcgggactccaggtgcgcaagaccaaggggcggcttcaggtcttatccgacctgatccacggcggcgcggacctggaggggaacctgggcatcgggcatacccgctgggccacccacggggagcccaatgacatcaacgcccatccccacgtcagcgagaacgggcggatcgccctcgtccacaacggcatcatcgaaaactatctggaaatcaaggagcacctcatgcgccagggcgtccacttcacctccgacacggacacggaggtggtggcacagctgctggagttccactacaacgaatgccacaacatgctggaggctgtgggccgctgcctgcggcggatcgaggggtcctacgccttcggcatcatctgtgcggattaccccaacgccctcattgccgcccggaaggacagccccctcatcatcggctacggtcagaacggcaacttcatcgcctccgacgtgacggctgtcatcaagtacacccgggacgtggtgtacatggacgatggggagatcgctgtcctcaccgccgacagcgtggacgtgtttgacgacgagctgctgccggtggagaagacccacagtctggtggactgggatgtgtccgcagcggagaagggcggctacgcccacttcatggccaaggagatcatggagcagccggaggcggtccgcaagaccatctccccccgcatccgggacggccgtgtggtgctggacaatctgcatctgacggcggagtacgtccgcgacctctcccggatttacgtcatcgcctgcggctccagctaccatgtgggcgtggtgagcaagtacagctgggaaaagctgctgcgccgcccggtggaggtggtgctggcctccgagttccggtactgtgatcctctggtggacgaaaagactctggtcatcgtcatcagccagtctggagaaaccctggacactatggccgccatgcgggaggccaagcgccggggcggccggaccctggccatcgtcaatgtggtgggcagctccatcgcccgggaggcggatgacgtgctgtacacttgggccgggccggagatcgccgtggccaccaccaaggcatacaccacccagctggtgctgatggatctggtgggcctctatctggcggacctgctgggtatggtggaacagagcgagtatgacaccattctctccgagatgcagctgctgccggagaagatgcgccagttcctctcccacacggaggacatccagtattacgcctcccggtacttcaaccacgactccatcttcttcatcggccggaacctggactacgccatgggcctggagggttccctgaagctgaaagagatcagctatatccactcggaggcctacgcctccggcgagctgaaacacggcaccatctccctgatcgagccggggaccctggtggtggccctgggaacctacgcgcctctctttgacaaagccatgagcaacgtggtggaggtgaaggcccgggggccgaggtgctggccctgaccaccgaggacttccgggaaaagatggagaagactgccgacgccactgtctctgtgccggtgacccatcccatgctccagccctctctgggcgtggtgcccctgcagctgttcgcctactatgtggcgctccagcggggctgtgacatcgacaagccccggaacctcgccaagagcgtgactgtggaataacgaattgccgcccggaccatctggtccgggcggtttttttacttgacttatatagggaatcgatatataatggcgctgtcaaaatatatagaatatctatataaggaggaagtctatggaggccgataagagtctggtcagcggcagcatggccctgttggtcctgaagctgctggaggacggggacaagtacggctaccagatgaccagcgagctgcggcagcggtcggaggacgtgttccacctgaaagcggggaccctgtaccccctcctccacagcctggaggaaaaggggctggtcaccgcctacgagcgggaggccgctgccggtaagccccggcggtactaccatctgacaaaggcgggggaggccgccctgcgggagaaggagacggcgtggcacacctatgccgatgccgtgggccgtgtgctggggggaggtgcctgctgtgccgggacctgagagcgtccggggctatctggacgcggtggaggcacaaatccgctggaagcgggcccggactgtggcggcccgggagctggaaactcatctggaggaccagcaggaggaatttctggccgaaggccatccgccggaagaggcggagcgcttggcagtggaggatatgggggacccggtggccgtgggcgcggacctggaccgcctccaccggcccaggccccagtgggggatgctgggcctgaccctggcgctgctgctggtgggcggctggttgcggtacgccctcacccgagcgggagcaccctgggatgaggatctggatccgctgcgctgtgctctgtcagtggtgaccggggctgctgtgctggtcggagcctacttcctggacgtctcccggctgctgcgctgggccaagtgggtgtacatcggtgcggtgatggcgggggtattgtccctacatctctcacccaatgtcaacaacgcctcttatttcacccggtatgtggtgctgttctatccggcagtctacgcactgtggctgtatgcctgccggggaaagggctggcggggcctgctggctgccgtggcgggcggcatccctttgacggtggtctgtatgtgtgcgccctttattcaggggatgattcagctgatggttattggctgctttctgctgttgctcgctatccagatggactggttcaccgtgccccggcggcagggactggcggcggtgggcggactggctgctgtgatggctggagcggtgctgtggatgctgttggtggcgggctataatgcagcgcggattcagattctcctgcacccggagatagacccacagggggcggggtatcaggctgtaatggctcgccggatacttggggcatcccgcctgatggggaagggaggagacctctcaatccagccgcaaacggtctggggcagggaactgctcccggagatgatgctgccggagtggaaccacgattttctgcccaccaccatggtctacaaactggggtggttgccctatctgctcctgctggcagttttggctgtcctgctgctgtggatgctgcggcgatgtgcctgccagcaaagccagagcggaaagctgctggcactggccgttgtcctgacgctggcggtgcagtcggcctttgcggcggcgctgaatctgggctttgtgctgttcagcgcccagctccctctggtgacgggaaatctccacagcatggtggactgcgccctgatcgggttggcgctgtcggccttccgctcagagtccattttgcgggacgcggtggttccggtcccgcggcccccgcaaacacaaacagcttgaccagaaaagacaagggcggagagggagcccctctccgcccttgctgtatacaattcgtcagttggcctcctgaatcaggaaggtctggttccccaccccgtccgcggatttctccacttccaggtcctcatgcgcctcctgcaccgccagctgcgcatccgtcataggctcccatgggataccggtactctccacaaaggcccgggcagcgtccggatcggctgtatgtgtgtccagcggcagggtgaacatgcagcccgtcacattgtcccgcagatccactgtgccgtcttctgccagggagaaacgctcataggagggggcggcgaatccctcatacagcgcgagatataccgtgtgatccgaaaatatctccaggctctgcgtgtccagtacataataggcccggccgtcccgcagaaaggaggagcaggcaccgttcagggtgaacacgttgacggcccggggatcatagccggacaccaggggcgtaacagtgaaggccccgcaggggaccacgtcatagttctcctctgtcaggggtgtgccgtccgtccggaccacggacaccacggcataggtgcggctttcctggacatcggcgcaccactgggagatgttggcgccgctgaccatccccatcagggtgacggtgtagtccccaacggtctgggtctcattgaggatcacggcggcttcgctttggaaggcctccgccaacattggatcgttcagttcctccgcaacctgggcgggggtcagccacagcacggcggcggacacagtcacggccaggagggccacggccgccgcagccagcagggtaatttttttcgtgcgattcatggacatcttgttctgctccttttcagatgcgtgccgcatggctgccagcttttgaagagtccgctcctcgaagtccggggagaagtccacggcgtcaaatgcggcgcggtagttctggcgattcattccacatcctcctttaaaagttggcgcagccgctcccgcccccgggagagtcgggtccccacggtagggagggggatttgcagcagcttggaaatctccttgatggaatagccctcataataatagaggtggatgacagcgctgtacttcgccggcagggcctgcacggcggaaaggatgggggagggctccggcatctctccgcctggaaggacctccgcggtctccagggggagattccgccgctccgccgcccgggccatgtcgcaggcccggtggagcgtggtgcggatcagccacgccttttcgtgctccaggtcccggaagtgcggccgggtggtcagcagcttcaaaaagacctcctgcaccacgtcttccgcgtcggcgggagaggacaggcgggtcatggcgatccgcagcagcatggggctgtacgcagccaccgtgcggcggatggattcgtcggtaccaaacgaagtcagggtcctcagctcctttcacccataacacggaccagcctgcccggattattcaccttccggaaaaatttgcaaagcccgttttctgcctgcgggagattgacagggagaagcggctgtgataatatgtaaaccaattatagcgtccctccgcactgcggtgggacttttttgggacacggtatgtcgaaaaaacaggaaaggaagcggatcatgggaaaaaaacgggtgtttgcggcgctgctggcgctggcagtgacagtggggtctctggtactgccggcccgggcggcctttaccgatacgacgggccactgggcggagaccgccatcacgaaatggagtgaggagtacagcatcatcaacggctatgaggacggcacattccggccggacaactccatcacccggggcgcctttgcgggcattctggaccgcttcctgaaattccaaagcacctcgcccgccgggacgttctctgatctgagcgggaactactgggaggatgccatcctgaagctccacgcctccggcgtttacctgggcaacaacgggcaggccctggccggggacaccatcacccgccagcaggcggtgaccatgatcgcacgggccttcaacatctcgggggagagcgcaacggtctattacctggatgcggaccaggtggcggattacgcgaagccgtatctggcggagatgtccgccctgggctacatcacggattcctccgacgggtacttccgtcccacggacgccatcacccgggcggagatcgtgacgatcctggacaacatgatcgaggtgctgatccagaccagcaccacctacacccaggacgtggagggcacggtgatggtcaacgcggcggagggggcctgcctccaggacatgaccatcacgggggatctgattctggcccccggcgtcaccgggacggtgaccctggagaacgtgaccatccagggcgcggtacggaacttcggcagcgccgtggtcacggacctctcccagcggccggaggagccggagcagccgccggccatccagcccggcgacgtgtacacgccctcggagaccacaggggagtatctgacatacagcaaccaacagatccccatctacgccggggtggagcggaaccgcttctcccagggagatttcatgtgggacccggaccgtccggaccgcctgatctataccggtgacgactaccggacccgcttcggcatcgacgtgtccgcctatcagaaccgggccagcgccaacaacaccatcgactgggaggccgccaaggccgacggcgtggagttcgccatggtgcggatcggcctgcggggctacggctccggcagcatcatggaggatgctttctacgcccagaatattgacggggccatggcggcgggcatcgagaccggcgtctacttcttcgcccaggccatcaccgtggaggaggccatcgaggaggcggactttgtcatcagcctgctggagggccacgagatcgacggccccgtggcctacgactgggagatgcacgacagcacctaccgggtctacggcaccacgccggagatggccaccgcctgcgcagtggcgttctgcgagcgcatcgaagaggccggctacgacgccatggtctacgccgggcagtatgtcagctacatcaaatatgaccagggcgctctggagccgtatctctcctggtaccccgagtacaagagcgagagctccgagcttctgtaccccaccctgtactatcacatggactactggcagtattccagcaagtgctctgtggccggtatcggcggcaacgtggatgtgaacctccagttcatccggcggtaagcccttctctccaaaagaaatacggcggggcgtctgccccgccgtatggcgattccaggggagttacttgcggttttccttctgggccttgttctggttctgctggctgttctcacggttctccttctgctgagtctggccggcatcgcgcttgttctggttgtcgcggttgctcatcaggacacctcctttcgcctgcttgagtacatggcatagtctcaccgccagctgcggaaattatacgcggaggctggaaaaaaccttgtcaccggaggaaaaaatggattgacaaaaggacaaaagggtgctatactaatccagcaaaacaaagaaggctgactgcatccgcctcacctccagcgatttggcaaagaggtttacactgctgtaatcagaccaccgggcggtggtttgttgttgcgcggatgcctgcatggtatccgcgttttgtgattctgagatggaggtgcttcgaccattagtaaagtagtgcatgaactgaacgaggagatcagagacaaggagattcgcctgatcggttccgagggcgagcagctcggcatcatgccccctgcggaagctttgaagatcgccgacgagcagggcctggacctggtcaagatctcgccgcaggccgttccccccgtgtgcaagctgatgaactacggcaagttccggttcgagcagagcaagcgggaaaaagaggccagaaaaaaccagcacgtggtggagatcaaagagattcggatgtctccgggcatcgacatcggggatttcaatacgaagctcaaaaacgcgcagaagttcatcgccgacggcaaccgcgtcaaggtctcggtccgattccgcggccgggagatggcccataccgacatcggtagggacctgctggaccggtttgccgcacaatgcgccgaaaccgccaatctggataagcccgccaagctggagggccggatgatgtccatcttcctctcccccaaatccggcaagtaatctgatttcaacgatacggaaggagcaaccattatgccgaagctgaagacccacagtggtgcaaagaagagatttaatctgaccaagaccggaaaggtcaagcgcgccaaggcctacaagagccatatcctgaccaagaaggataccaagcgcactcgtcgtctgcgtgccggcggctatgcggataccaccaatgtggatgccatccgcaagatgatcccctacaagtaagacacgagacgttcaaataggaggtttttgaaatggctagagtcaagggcgcgatgatgacgcgcaagagaagaaataagatcctgaagatggcgaagggctactggggctccaagtctaagcacttccgtgtggccaaccaggccgtgatgaagtccctgagctatgcctacaccggccgccggctgaagaagcgtgatttccgctccctgtggatcacccgcatctccgccgcctgcaagatgaacggcatgaactactccaccttcatgcacggcctgaaggtcgctggcattgagatcaaccggaagatgctggcggagatggctgtcaacgacgccgccgccttcacccagctgaccgagatcgccaagaaggcgtaagatccctttccagactatgtgagcagcgccctcccaaatgggagagcgctgctttttgtatatccaggacggaggggaggcaatccccgttgtgccccttcggtcaggctttccggcagaagtacggcccgcggtccgcctcatggggctgcgcaaacgtccaggtgaaatccttgtctaccacgtaccagtccgctccgggaatggcgcgtgcatctgcgggcagggtaaccagctcctccgccgtcaccggccgcaccagaggctcaccctccggcggctcttcataataaaagaggtatttctcaccggatgcctccgacagagcctgccgggccgcgtcgccggacaggcagggcaccaggttccaggagaagagatgccacaggtaattcccatccgacagcacatgcctccccaactccgcgtcggacacgccgtcggcaaaaacgtccagccagcggttcttcacccgccgaatgtcggtggggaagggttcctcccagggaaccatggtggccacacaccggcagatgggcagcccctgctcatggaacttggcctcgtagtccgtcatgacgcccaccgggccattcgcatggaggtcccgggtgacctcggacagctcaaagccgaacagaggcagctcctccacggagaaggtgaagaggtcctgattgtccgtcttgaagtggatctgcccgcccatcttcagcacctggcggtacagccgcaggaagttgccgtgggtcaggcggcgcttggcgtggcggttgctgggccagggatcgcagaaattgatatagatccggtccgcctctcccggggcaaagaacaggggcagctggtcagcattggcgtcgatgaagaacacgttggtgagcccctgggccgcacaccgctccatggccatgaccatggcatccggcacccgctccacagcgatgaacagcacgtccggctccgccgccgctgtgccggcggtgaagcggcctttgccgcagcccagctccagccgcagctcccgggcctggggcatcagctcccgccacttgcccggcatggagtagggctcccggatcaggcggtcgccgcagcgctccatccgggggatcagattctttttctttcgcatccgcatgtgtcaacatcctcctgggtcggttcccgatccgatttcaggaagaccccgccggggagtcctccgtacattcagaatgctattgtaccatacagacccggcgctgtaaatggcggcgtggatttcctgcttgcgcggaaagcaaagagatgatatgatagcccaaatgggaggggggagcgatgtgcccaaggtgccctactgcggcagaagcatgttttatcaggaggcgggcgagggcccggtcctgatctttctccatggcaataccgcctcatcccggctgtttgagccgttgcttccactctatacgcctcatttccggtgtgtgctgctggactttctgggaaacgggcgctccgaccgggtggagtcgtttccggcggacctgtggcaggaagaggctcggcaggccctggccctgatccgggcggcgggctatgagaggccctgtctgctgggaaccagcggcggcgcctgggccgccatgaacgcggccctgctggcacccggcgcagtaggcgccgtagtggcggacagctttgacgggcggagccttcacccggggtttgcgcgggatttgacagcagagcgggaccgcgccaaaagagacaaggcagcccgggaattttatgcatggtgccagggaccggactgggaggcggtggtggaccgggacacggatgccctgttgcgatgcgccgcctccggacggccgctgttctgcggcccgctggagcagatgcggccgccagtgctcctgatggggagccgggaggaccccatgtgcagacaggatttggaagaggaatacaaggcgatggcggcgcagatgccccatgccgccgtgcgcttgtttgcatccggtgggcaccctgccattctttcccgggcggaggcggctaaggaggagatcctggcattttggctccggtgcgaggcggccgagaggctgtgagatttccggcagatacaactggaacgaagggccttgtgaatgcattaacaaaattgtataaagtttaacgaacaatttgtatgaagtgtaaaaaacgtgaaatttttcgcaaactgcacaaattatacttgataaatgccgccagtcaccctataataaagtttgtgagtaaattggcaatatcggaatgactctgtgttctcccggaggggcggcacagcccggccccctggagtgccgaaaggcatgaaacaaggaaaccaaacaatttattcaaaaataacaggaggaaaaatcatgaaggttgcagtttttggcgcaggtaccatgggcagcggcattgcgcaggttttcgcggcaaagggccacaccgccctgatgtatgccagctccgtcgcttccgcgcagaagcacaaggataagctggctgcttccctgcagaagcgggtggagaagggcaagatgacccaggaggctgtggacgccctgctggccaacgtgctggtggaggagaagtccgcctgcgccgacgcggatctcatcatcgagtgcgtcaaggaagacatggctaccaagaaggagctgctgaatgagctggacggcctgtgcaagcccgaggccatcttcgcctccaacacctcttctctgtctatcaccgagatgggcaacggtctgaagcaccccgtcatcggtatgcacttcttcaatcccgtgcccagcatgaagctggtggagatcatccgcggcgccaacaccacccaggagaccttcgatttcgtctataagctgtcccaggagatcggcaaggagcccgtcgaagtggctgaggcccccggtttcgtggtcaacaagatcctgatccccatgataaatgaggccatcggcctggtagagaccggcgtcgcctccgtggccgacatcgacaaggccatgcagctgggcgccaaccatcccatgggccccctggctctgggcgacttcatcggcctggacgtgtgcctggccattatggagaccctgtacaatgagaccggcgactccaagtaccgtcccgcgctgctgctgcgcaagatggttcgcggcggcctgctgggcaagaagaccggcaagggcttctatgattattccaagtaattgaagtcagcaccaacaagaaaaggagttaatggtatatggattttcatctgacaaacgagcagcagatgctccggaagatgtaccgtgaattcgccgagaacgaagtgaagcctctggctgaggagatcgacgaagaggagcggttccccatggagaccgtcgagaagatggccaagctggggatgatgggtatttacttccccaaggagtacggcggcgccggcggcgacgttctgtcctacgccatgtgcgtggaggagctggccaaggtctgcggcaccactgctgttatcgtttctgcccacacttccctgtgctgcgcccccatctttgagcacggcaccgaggagcagaagcggaagtatctgcccgacctgctctccggcaagaagatcggtgccttcggcctgaccgagcccaacgccggcacagacgcctccggccagcagaccctggcggtgctggagggcgaccactacgtcctcaacggttccaagtgcttcatcaccaacggcaacgtggccgataccttcgtggtgttcgccatgactgacaagtccaagggcaaccacggcatctctgccttcatcgtggagaaggacttccccggcttctccaccggcaagcacgagaagaagatgggcatccgcggctcctccacctgcgacctgatctttgaggactgcatcgttcccaaggagaatctgctgggcaaagagggcaagggcttcaagatcgccatgcagaccctggacggcggccggatcggcatcgccgcgcaggccctgggcctgggcgagggcgctgtcaacgaggctgtcaagtacacgcaggagcgtgtccagttcggcaagcgcctgagccagttccagaacactcagttccagctggccgacatgcacacccggatgcaggctgctcagtacctggtgtacgctgctgccatgaagaagcagaatcacgaggactattccatggacgcctccatggcgaagctgttcgccgctgaggctgcctccgatgtcacgcgccgcgccgtccagctgttcggcggctacggctacacccgcgagtatcccgtggagcgcatgatgcgcgacgccaagatcaccgagatctacgagggtaccagcgaggtccagcggatggttatttccagccgcctgggcgtgaagtaagataggaggtaaaggttaacatgaaaatcattgtttccatcaagcaggttcccgacacctccggtaaggtggcggtgaatccggacggcaccctgaaccgtgcgtccatgcagaccatcaccaaccccgacgatatgaacgccctggaggcggccctgaagatcaaggacgccaccggctgcaaggttgttgtggtgaccatgggtccgcctcccgctgccggtatgctccgcgaggcgctggctatgggcgctgacgaggccgtgctggtgtccgcccgcgagttcggcggttccgatacatacgccacctctcagatcctggctgcggccatcaacaagatcggcgtagaggctgacgacatcgtcatgtgcggccggcaggccatcgatggcgacactgcccaggtgggtccccagattgccgagaagctgcatctgccccaggtgacctacgccgccgacatccagaaggacggcgacaccatcaccgtcaagcggatgctggaggacggctacatgaccatcaaggtcaagactccctgcctgatcacctgcatcaaggagctgaacgagccccgctatatgagcgtgggcggtgtgttcgaggcttacggcaagcccatgaccacctacgactatgaggcgctgaaggacgatcccctgatcgacgccaccaccatcggcctgaagggctctcccaccaacatcttcaagagcttcaccccgccccagaagggcgccggcatgatgctggagggcgccgacaaggcgacctgcgagaagctggccgacattctggcgaagaagcacatcatctgagaaaggggataaacgaatatgtctaatttcaacagcgccgatatcgctgctttcaaggatgtgtgggtcttctgcgagcagcgcgagggcaaactgatgcccaccgactttgagctgatctccaagggccgcgacttggccgacgagctgggtgtgaacctgtgcggcctgctgctgggaggcgagggcatcgagtccgctgccaaggagctgggcggctacggcgccgacaaggtgctggtgtgcgagagccccctgctggccgtctacaacaccgatgcctatgccaaggtgatctgcgacgtgatcgaggagctgaagcccgaggcgttcctgatcggcgccaccaacatcggccgtgacctggggccccgctgcgcggcccgtctgcacactggactgtgcgcggactgcacccacctggacgtggatgtggcgaactacatccagttcctgcgtgagtccagcaccctggacgtggacagccagaagtgggatatggaggaccggaacctgaagatgacccgtccggccttcggcggccacctgatggccaccatcatctgcccgcggttccgtccctgcatggcgacggtgcgccccggcgtgatgaagaagaacgtcttcgaccaggccaaggcggatgcgtgcgagatcgtgaagcccagtttccagctgagcgagagcgacctgaacaccgaggttgtggaggtcgtgaaggccgccaagaagctggtggacctgatcggcgcggactacatcgtgtctgtgggccgcggcatcagcaaggatgtcgagggcggcatcaagctggctgaggagctggcggacgtcctgggcggcgtcgtgggcggctcccgtgccaccatcgactccggctggctgtctgccgaccatcaggtgggccagaccggcaagacggtgcatccgaaggtgtacatcgccctgggcatctccggcgccatccagcacaaggccggtatgcaggactccgagtgcatcatcgcggtgaacaagaacgacactgcgcccatcttcgagattgccgactacggcatctgcggcgacctgttcaaggtcacccccatgctgatcgaggccatcaaggccgccaaggctgcgaagtaagcgaataaaagccaagagccgcacgggcaaagcccgtgcggctctgttctgtttgaacacctatgggggataccggcagttcaggactctgcgcgctcggcggcacaatccggatgctctgcgacaaactccgcctcagcctccgccaggatctttttgtctgccttggtggtgagttgggatttatcgaatttggcgaacaggtccggccgccgttccatagtgcgcttgtagctctgctttttccgccaggcagccaccttaccgtggtcaccggagagcaggatctccggcactgctcgaccgtgccattcagccgggcgggagtattggggatattccagcagcccgttccagtgggattcctcctcaaagcactccgcatccggcagaacgccgggcaccatgcggcacaccgcgtccgccaccgccatggcggggatctctccaccggtgaggacgaagtccccatgctgatctcctcgtccacacactcgtccaggaaccgctggtccacaccctcatagtggccgcagaccaggatcaagtggtcatatcgcgctttcagctccttggcaacttcctgggtgaaggtgcggccgcagggggagaggaagatcgtccgtccggggccgtaggtctccacgatgtggctccagcagcggtacaggggatctgcctgcatgacagcgccccggccgccgccgtagggatagtcgtccacctgcatctgcctgttggtggtgtattggcggatctggtggctctggatggagatatagcctcgctgctgggcccggcccaggatgctcacgttcagcatggcgtccactgagtctgggaacagcgtcatgatgtcaattctcatccgtggccatcccttcccaaacctggacctccatccggttggcgtccaggtccaccgatttgataaacacatccggcacggcggggatcagatactcccgcgctcccctgaccgtgtagaccttgtgagcgggataggagtccacccgggtgatctcgcccagcgtctcgccggtggcggcgtcacagacggtcatgcccagcagctccgcatcaaagcaggcgccctccggcagcttggcgtctgcccggcggatatacaggttcttacccttcagggccagggccgcgttcatatcatccacgccggggaacttcatcagcaccagggacttgtggacgtggttggcggtgggggtgacgggggccccgtccaaatagaacgtctggaactgggtcaggaaggcagggtcctggccgtccggctgtacccgcacctcgccccggatgccgtgggcgttgacgatgcggccgattttgatggtttccaatctcataggagcgctcctttgggaagtgatggcacgccgggccgtctccgacccggacaggaggcaggcgggccccgtaccctcctgcctgacaacgtttattggcttgtttctgtgtccgcccttcccagggcggaggcggggaacagagagatggtcccgttgtcgttgagatagcgcagcagggacagcaggatgggcaggccgaacaggcccacgatgccaaacaggtggttgcccacaaacatgctcatcagtgtcagcacaggatgcaggccgatctgtgcccccacgatccggggctcgatgatgttgcggatgacggtgatgatgacgtacagaaccagcagtgcgaaggcgtggggaagatctccgcccagcgcggagagaatgacccaggggatcatgatacctccggtgcccagaacggggagaatgtcgaaaatagcgatcagcagcgccaccagaatcgcacggttcacgccgatgagggtcagaccgacggatagttccacaaaggtgatggacatgatgagggcgtaggagcggatgcagacgaacagcgttcccaccacatacgccttgacctggagtaccagattccgggtgctcccctggaggcagcccaggcaaaaccgcacgatcttctggtagtcgacggcgatgaagaatgtggaaatcaccatcagcagcagccggatcaggaagccgggcagggaggtggcgaaagaggtggccatggacacaccgcccaccaatacgacggagagactggagaccaactgccacagcatattgagcagctgggactgcagctcctgcaacgcggacatgagggaggggtccagcttggccagcagctcctccagccaggcgaaaaagtcagtgagctccgggagaatataggcggaatagagcgagggaatctgctgcaccacagatgtgatagtggccgtgatccggattcccgccagcgccagcagcaggccgatggtgccgtatgtgaggaccaccagcagtaccgccaccaaccccttgggcgcgtggagcacccgggagaggaagcggatggggcggcgcagaacataggcgatcagaaacgccaagacgaacggcagcagtagcggcagcgcatactgcagcaacagataactcagcaccagaatcagcgctagataggtcacatcaatgatgaattttttctttttttctgtggacaccaaaagcctccaatcccacaggcagcgtcacctgacgcttgcggtgtagtacaagtaagcagtggaacgggctggccgaagcggcggggccgcagcccggacagcggcagcgaaatgatcgaaaaaggaggaggcctggcctcctcctttcggatctggcggaagcggcccgccggatgatcggttcaatctacaatatctacggaaaccttctggccggtgcgctgggcataggaccggatgacagtccggatctccttggcgatgcggccctgccggccgatgacctttcccatgtcgtcgggggcgacgcgcagctccagcgtcagctcctggggaccctccacctcagtgacagagacggcctccggatcatccacaaggtttctggcgatgtagagcagcaactctttcatgcccgatcctccggatcagaggacttctacttttttcagcagagctctgacggtgtcggtgggctgggcgccggacttgatccaggcctgggcgcgctccgtgtcgatcttgatctcagcaggggagacgcaggggttgtaagtgccgatctcctcgatgaagcggccgtcccgggggaaacgggagtccgctaccacaacgcggtagaaaggagccttcttggcgccaaggcggcgcagtctgattttcaccataatttgttacctccaacagtaaactcgaaattttttatctataaatgcatagcacttatatccactttatttcagccgcttcttgcgaccgaagccgtgcatccggctgcccaggccgccgcctcccattttggaaagccgtccccgggtcatctgcttggtcagctgctgcatcatatcgaactgcttcagcagccggttcacatccaccacctccaggccgcagccggcagcgatgcgctttttccggctggcgttcaggatctggggattctcccgctccagcggggtcatggagaggatgatggcctccgtgtgggccagggccttgtcatcgatggtggcaccggccatctggcggcccagagcaccgggcatcatgctggcgatctggctcaggtcacccatattccgcagctgctggagttgttcgtagtaatcctgcagcgtcaggcggtttttccggagcttttcctccagcttggcggcctgattttcgtcgtaggtctgctgggccttttcgatgaaggacagcatatcgcccatacccaaaatgcgggatgccatccggtccggatggaagggctcgatcatatccagcttctcgccggtacccacgaacttgatgggcttgccggtggaggcccgaatagagagagcagcgccgccacgggcgtcgccgtccagcttggtcagcaccacgccgtcgatgcccagcgcctcgtcaaaggcagtggcggcgttcaccgcatcctggccggtcatggcatccaccaccagcaggatctcattgggatggacggcagccttcatccgcttcagctcatccatcagggactcatccacatggagccggccggcggtgtccaggaagaccatatcactgccgtggtcccgggcatggcggattgcattctctgcaatctgcaccgggtcaccctgaccctgctcgaataccggcaggtccagctggccacccaccaccttcaattgctcgatggcggcgggacggtacacgtcgcaggcggccagcaggggccgcttgccaagctggcggcgcatcagccccgctagcttggcggtggtggtggtcttgccggcgccctgcaggcccaccatcatcacaacggtgggaccgctgttggccatggagagccgggcggtgccgccgcccatgagctttgtcagctcttcgttgacgatcttgatgacctgctgggcgggcgtgaggctgtccaacacgtcggaccccacagcccgctctgtcacggtagccacgaagtccttgaccaccttatagcctacgtcggcctccagcagggccagacggacttcccgcatggcctcccggacgtcgttctctgtcaggcggcccttgccccgcagcttcttgaatgttgcgttcagtttttcggtgagcccttcaaatgccatgcgatcattccttcaaagcggtggcttccgcgtgaatcaattccgccagctcagtcagacgggggtcctcatactggcggtagttgatggtcttcagctcggcggctgcatcctcgatggcctgcaaatggccccgcatctgctcgaagcgccggatcaggccggtcttgtcctccacctcctgcatgacgccctccgcccggacgatcacgtcccggacgccctggcgggagatgccggcgttttccgcgatctcagccagagacaggtcctcattgtaatagaggtcaaagaattccttctgccgctcggtgaggagttcgccgtaaaaatcgaagagcatggtcatgcggtatgtctgatttttcatgaactccctcatttctgtaaagctgtattcctttacaacgagaaatagtttacaggattttgccggaaaagtcaaggggaaaaacgaaagaaatccggaaaaaattcccctccggcagaccggaacggcttgccaaatccgcgtttgcggcatagactgagagggactgaacagaacggagggagtttatggtattcgacgcgcattcggatctgctgtacgatgtgacccggcggcgcctgctgggggagcggcgggtgctggagcaccaccatctggaccggctgcggcggggcggcgtggaggggctggtgctggccgtctgggccagcggtccccgagagacgttctggaaggacaccgcctggaaggatcctgcatccaatttgggccgcacccatcagatatttgcctgtgcccgggcagacctggcggaatgtccgcaaatccgcccggtccacaccgcagcggaggcagaggctgcccgggcagcgggccaaatctacgccttcctggcggtggagggcatggcggccatcggcgggaaccccgccggcgtggactggtactacggccagggcgcccggctggggatgctcacctggaacgagaccaatgccctggccgccggagccggaggcgatcctcaggcggggctgacggaggcgggacgccgggcggtgcgccggatgggagaactggggatggtggtggacgtgtcccatctgaacgacggcggcttctgggacgtgatggacctggccgccgggccggtgatcgcatcccactccaactgccgtgccctgtgcgatgtgcgccggaacctgtccgacgaccagctgcgccgcatccgggacaccggcggcgtggtggggctgaacgccttccacggctttgtccacgccgagccccggcagcagaccgccaggaccctggccctccacgccgtccacatggcggaggtcatgggggtggagcatgtgggctgcggcttcgacttctgcgagtttatgggccctggaaacgaggggcagagggcctggaaagcgccgcccacatccggaacctcttctactggctggaaaagctggggatgaaccggcaggagctggaaatggtcgcccggggcaattttctgcgggttctggcggggccagacctgccgccgcaatgagaaagacagctgctccccatcggagcagctgtctgattttctgcatcacggctgtgtgaagcctagatagcgggtgccctgaaaggtcaggcggcccgtgtccccttccaccaggagaccatactcccggccactgacggagaactccatccggtcaccgctctccacctgaaaggtgacatagtaccgggtggaggtggtcatgtgatgggtctcgcctccgtggtgatggtgggagacatcgatccgcttggccaccacagtggcctccaccgtcaaccgggggagttgttgttccggtgccactggctgacaccccggacgatcatcacaatgaagagacagagcaccagggcgaagatcagaaagaacaaaatttcgaatccgccgccgaacataaaggagtctaaaagccccatgccgccaaagccgggcgtggtcatgaagatcccaccttttcctcttgttgagactgattttaccagataccgcataagtcggcaagaaagaatttgaattatgggaagagatatactataataatcccatgttgtattccacagaagaggagttgagaccttggaaagaaccagaatccaactggccgacggggtgtatctcacctatctgccggccagaaagttcaagaccagcctgctctccgcccagttcgtcaccccgctgcagcaggagactgcctccgcttatgcgctgctgccggccatcctgcgccggggcacggtgcgctatcccgacctgggggcgttgtccgcccggctggaccggctgtacggtgcctctgtggactacaccgtccgcaagcagggcgagaatcagtgcgtaggcttcgtggccagctttatcgacgacagctacatccccggtggggaacagctgctggagccggtggcggagctgttgggagagctgctgtgcgatcccgtgaccgagcggggccgctttgtgaccgcttattttgagggggagaagaccaacctgattgacgccatccgcagccaggtgaatgacaagcgggagtatgcctacgcccgattgctgcgggagatgtgcgacggggagccctacggcatcagccgcctgggcgacgaggcgggtgcggagaagctgcagatgccaaagctccacgccctgtacggagagctgcttgccaccgccaggctggagctgttctactgcggcagcgcatccctggagcgggtacgggaggcgttggccgcagctttcgccacgttgcccagggatgggatccgggacatcgctccgtccacgccccatccggcccggaccgaggtgaagcgggtggaggaggccatggacgtgactcagggcaagctgggtatgggctttgcctgcggcagcgacgactacgccgccgcgctgatgggcaataccctgtttggcggcagcagcaactccaagctgtttttgaacgtgcgggagaagctgtccctgtgctactacgcctcgtccgcctaccaccggcagaagcggctcatcaccgtctcctccggcattgagttccagaactaccagaaggcctatgacgagatcatggcccagctggccgccgtgcaggctggccgcctggaggactgggagctggagggcgcccgcagtacgctgctgaatgcctacgcctccatgggagattcccaggggaagctggagaacttctacctgggccaggcggccaccggacaggaggacacgccggagctgctggcggagcaggtgcggcacgtgacggcggaacgcatctttgacgccatgcagaccgcctctctggatacggtgtacttcctgaagggaaaggagactgcggaatgaagcagacgttttacgagcggatcggcgagtccgtctaccgggaggtgctgcccaacggattgcaggtctgcgtggtccccaagccggagcacgccaagaagtacgccttctttgccacccggtacggcgggatggacacccgcttctgtctggacggtaagtggctggacacaccggcgggcatcgcccactatctggagcacaagatgttcgacaccaaggagggtaacgccctccaggagctggcgaaaaacggcgcggagcccaatgccttcacctccaacgccatgaccggctactacttcgactccacggagcactttgaggagaatctggagatcctgctgtccttcgtctctatcccctatttcacggaggagagcgtggccaaggagcagggcatcatcggccaggagatccgcatgatcgaggacaaccccgactggcagctctacacccggatgatgcaggccctgtaccagaagagcactgcccgcacctctatcgccgggacggtggagagtatctcccacatcacagcggagacgctgtacgactgccacaaggcattctacaccccctccaacatgattttgacagtggtgggcaacgtggatccggtccatgtggcggacctggcccggcggatcctaccccgggagggcgggcctgcgatcccccgggactacggccaggaacccgcccaggtggcggcaaaggagacccgcatggccatggaggtctctgcccctcagttcctgacggcctacaagtgcgccccggcggcggacggggaggactacctccgtaccgccgttctgggagacatggcctgcgacatcctgctgggggattccagccacctgtaccagcggctctatgaggagggggtcatcaacaccagcttcggcggcgcctttgagatgatgccgggcgtggcatacctctatgccggcggcgacagcaaggacgcccgccgggccgccgctgagatccagagggaggcggagcgcctggcagcggagggcatcgacgaggactattaccagcgggtgcgccgggcgtccttcggctccaacctccgggggctgaactcctttgagaacatcgccgtgaccctgacggaggggtatttccacggctatgatcccttccgcttcccccaggtgttcgactccatcaccaaagaggacgtggccgccttcctgcgccgcaatctgaccgcggagcgggctgtgctcagcgagatcgtgcctagggagaactgaatccaagacagagaaagagggggaaccccatttgagagcattacaggatatgcccatcagctttcccggcctgttcggggactggtccttcaatcccgaccctatcgccgtccatatcggccatgggatctactggtacggcatcattttggccatcggcctgctggcgggcctggtgctgtgcatgaagcaggccaagcgctacggcctgacagaggacaatgtgctggatatggtgctgtgggcggtgcccagctgcatcatcggcgcccgcctttactatgtgatcttctatctggacctctaccgcaacgccgatggcagcttaaactggggcgagatggtggcggtctgggacggcggcctagccatctacggcgcggtgattgccggggccatcgtggcatttttctacacccggcacaagaagatcaagatgggcgccatgacggacctggcggtgatgggcctgctgctgggccagtgcatcggccgctgggccaacttcatcaatcgggaggccttcggcgccgagaccacgctgccctggcggatgcgcctgtggaccagcgccacggagtatatcgaggtccatcccacgtttttctatgagagcctgtggaatctgatcgggcttctgctgatcctgctcgtggtctccaaagcccgccggttcgatggggagaacacctggttctacttcctgtggtacggcctgggccggttctggatcgaggggctgcggacggacagcctgtatctctttaactggacgttcctggggcagcccatccgggtgtctcaggcgctgagtctgcttctggcagtcaccgccgcggtgatgctgttctacaacatcaagatcaaaaagcactcgcgggatgagttgctggtgaatcaggtggcggcggaagccgtcgaggggacggcagaggcggatatttccacggcggaagcgggagagagtgtccctgccggacaggaggagccggagctcccccagccgccggagacccaaaacggggaagggggagagactgatggcaacacgcattgacggcaaggcgctggcggccaaggtcaaggcgcagacggcagaggcagcgaagtccctgtaccggcggccgggccttgcggtgatcctggtggggaatgaccccgcctcccgggtctatgtgaccgggaaggaaaaggactgcgccgagtgcggttttttgagctttgagcacgccctgccggaggacaccacacaggagacgctgctggacctgatccaggagctcaaccgcgacccgcaggtggacggcatcctgtgccagcttcctttgcccgggcatctggacgaggaggcggtgctgaacgccatcgcccgggacaaggacgtggattgcttccacccctataacgtgggccgcctgatgatcggtgatccggtgtttctgccatgcacccctgccggcgtcatggagatgctgcgggaatacggcatccccgtccggggcaggcggtgcgtggtgctgggccgcagcaatatcgtgggcaagcccatggccatgctgctgctccagcaggacggcaccgtgacggtctgccactccaagacgccgggactggcggccatcacccgggaggcggacatcctggtgtccgctgtgggccgggtgggtcttgtcacgccgggtatggtgaaggaaggggccgtggtcatcgacgtggccatgaaccggaacagcgagggcaggctctgcggcgatgtagacttcgccgcggtagaacccaaggcatcctacatcactccggtgcccggcggcgtggggcccatgacccgggccatgctgatgcgcaatatcctcaccgcagcccggaaccaccaggcggagaagtgaacagacgaaaagagcgccgcggcttttggccgcggcgctcttgatttgtatggggagaagctaccgttcctcccggaaatacgccagacccaggctggcggggggctgattctccttcttgttccgcagggagacaaaaatcagcaccgcgatggtcacgagatacggcagcatgttgaagaggtacgtgtcccgccggcccaggccggggatgatgaggtacacccagaacagcaggccgaacaggtaggagccccagatagcgttgactgtccgccaggtggcgaagatcaccagcgccacggccagccagcccagggactcgatggtgccgtcgttggcccaggtgcccttgatgtagtccatggtgtagtacaggccgccgagaccggagataccggcgcccacgcaggtggccaggtacttgttgcgggagacgttgatacccgccgcatcggctgtggcaggattctcacccacggatcgcaggttcaggcccggccgggtgcggttgaggaacagctgcagcaccacggccagcacaatggccagatataccatgaagccatagctgaacagcagccgcccaggaagccccaggtccgacaggccggggatggtggcccggtacacggcgctggtggcggctacggagatctggcccacgccgccggccatggagttcagggtgccgccgaagaagttggccacaccgccgccgaagatggtcagcgtcagaccggtgacgttctggttggcccggagggtgatggtcaggaaactgtacagcagaccgcccagggcggaggcggcgaacgccgccagcagagagatcaccagacacacgaaaccggagggatcgggattgttgaactcatagaagaaggaggccgccagtcccgcaataccgcccagatacatgatcccggggacgcccaggttcaggttgccggatttctctgtcaggatctcgcccatggcgccgaacagaatgacggtgccgaactggatagcagactgaatcagctgaacaatttggtcgacgctcatttggccccctcctttccgccccgcaggatgatgcggtagttgatgaaaaattcgctgcccagaatgaagaacaggatgatgcccgtaatgatattggaggcgtagtcattcaggttgaactgggaggcgatctgaatggcgcccttctgcagaaacaccagcaggaaggagatcaggatcatcacaaaggtgttgaactgagccagccaagccacgatgatggcggtgaagccacgtccgccggcggtggaggtggagatggtgtggctggcgccggccacggcgatgaagcctgccagaccgcagatggcgccggagatagccatggtgcggatggtgaccttcttcacgttgatgccggcgtaccgggcggtgttctcactgtcgcccaccacggagatctcatatccctgcttggaatatttcaggtacaggaacatccccaccgtcagcagcagcaccaggacaacattcaggccgtattcctggccgaacagctccgggaaccagccgtccttggtccgctggttgatgacgcccacggtattggagcccacgggattttcccacagggccacaaagtagctggtgagctggatggccacgtagttcatcatcagggtgaacagcgtttcattggtgttccacacagccttgaaggtggcgggcaccatgccccacgccgcaccagccagcaggctgaccaccgccatgatgaccagcagcaggggggtggagatatcgccgccgaaggcccgcataaacccggcggtgacgatgccgccgatgaggatctgtccctcggcgccgatgttccagaagcgcatcttgaaggcgggggccagccccacgccgatgcacagcagcatcatggcgtcccggacagtaacccagctgcgccggggggtgccgaaggcgccgtcaaagatgccctcgtacacctggaaggggttcagcttggtgacggcgaagatgaagatgccgctcacgaccagggacagcagcaccgcgatgatccggatggcccatgccttggggcgggcgatgccgtcccgcttggcgatgcggagcagaggctccctgtgggtcttaccctgtgtcatgcctccttcgcctcctttacaaagcgggtcatcagcaggcccacttcctctttggtggtggtgcggccgtccacaataccgctgacctggccgccgcagagcaccaggatccggtcgcacagctccagcagcacgtccaggtcctcgcccacatagatgacggccacgcctttcagcttctgcgccgtcagcaggttgtagatggtgtaggaggtgttgatgtccaggccccgcaccgcgtaggcggtcatcaacaccgagggattctgggcgatctcacgtcccaccagcaccttctgcacgttgccgccggagagccggcggaccggcgtgttgatgctgggggtcagcacatccagttcctccttcacccgctccgccagctggcggggcggcttgcggtccagcaggggtccccggccggaacggtaggtcttgagcatcatgttgtccgccatgcccatggaacccaccagtcccatgcctagccggtcctccggcacaaaggccatggacacgccgatgtcgtggatctgccggggattcttgcccagcagctcctcaccgcccttgtccaccggcacatgctgaccggcgatgggttcgtcgggggcggggggatgatagatgacgtgggacccgggctgggtaacccgcaggccggcgatggcctccagcagttccttctggccgctgccggagatgccggcaatgcccagaatctccccgccgtaggcgtcgaaggagacatggtccagagccttgatgctgtcgggagtcaggaccgtcagatccttcacctccagccgcaggttgcggtcctccaccaggggacggtcgatgttcagcgttaccgcatggcccaccatcatgtccgtcagcttctggggagaagtgtcgcaggtggccacgtccccgatatagcggcccttgcggagcaccgccacccggtcggacacgtccatgacctcgtggagcttgtgggtgatgatgaccagggccttgccgtctgccttcatattccgcatgacatcgaagagccggtccgtctcctggggggtcagcacggcggtgggctcatccaggatcaggatgtctgcgccccggtagaggaccttgatgatctccaccgtctgcttctccgacacggacatgtcgtagatcttcttgttgggatcaatggaaaaaccatatttctcactgatctccaggattttggcggaggcggccttcagatccagcttgcgctctccgtccagccccaggacgatgttttccgctgcggagaacacgtccaccagcttgaagtgctggtggatcatgccgatgccgcaggcaaaggcgtccttgggggaggcaatggtggtgggctcgccgttcaccaggatcttcccttcgtccgggaagtagatgccggccagcatattcatcagcgtggtcttgccgctgccgttctcccccagcagggagaggatttcgccccgcctgatctccagggagatatcgtcgttggcaaccaccttgccgaaccgctttgtgatgtgccgcagttcaatggcagtggtatgttccaaacagatcatcctttcttttagtgtcggttccgcgccatggccgcaggcacatgcctgcggcgcgggcctccggagggaaaagaaaagggaaaaaagaccccggcggccgatgccgcggaggggatggagcgatttgagagaaaggggctgccaaagggcagcccctttcgttggatatttagttgttgttcagctcagtgatgccgtcgatccgcagggagaagtacggagcggagcgcagcacggactcctggaaggcgccgtccacgatggcctcgccggtgtcgttgacaaagtcgccgtcgctgtccagaccgaacgcagatgtcacatgaccgtcggcgtccacctgataggacccgtcggcagcgggctggcaggtgaacttggaggtgtcgaacaccttcaggctgccgtccttgatgctggaccaagcggcgtccacggcctcctgggtgccctcggcgcactcaggccccagcttggagatcatcacagcgtcctcactgatgcccacggcatagtccacgggcacttcctcgccggcgatgaacttctccagggtgtcccggtacaggacggaccagttgttctgggaagaggtcagagcggcggtgggcgccacttccagcatatcaatgttgtagcccacagagtagaccacagagccggcatccttctgcgcctggacggcggagggggcaccggtggagtcggcgtgctggccgatgatgacgcagccgcgggccatcaaggcattggcggcctcgccctcagccacgggatcataccaggagttggtgtactggacctccatgtaggcctcgggaacctgggtctggatgcccagcaggaaagcggtgtagccacaaaccacctcggcatagggataggcacccacatagcccaccttgggatcggtgacggtgccggcgtccatcagctctttcagcttcatgccggccaccacgccggagacgtagcgggactcatatgtataggggaacaggttcttgtagttgtccagaccggaggtggcggccatgtcgccggtgcaggagacgaaggtaacgtcgggataatcctcggcggcatccagcatgtagctctggtggccataggagtcagagaagatgatattgcagccctcttccgccagatccacggcggcgtcatagcagttttcatcctccgcgatgttgtagcggaaaataacctgagaattggcatcaatacctaactcttcacaggcggcagtcaggccctcgatatgggccgcgtcataaccggagttgatgtcgtggacgcagatcaaaccgatcttgacatccgcggcgctgccgctggattcctcattggcggcggggtcttcggcggggctgccggtgctctcctcgtcggagccgccgcaggccgccaggctgagcgccatgaccagcgtcagcagcagtgcaaggaacttcttcattctactttcctccttaaaataaaattgggtggatcactgcaagggacaaagcggggtgtttcccctctctattgccatcatacagggtcaaacggaaaaattcaaccggatttttactttttttaggcggatagaccaaaaaaataccgacctaaataggtcgacctttggcagtgtgcacaataataagacgaaaaagacaaacaaggagagcgtttttttcgctctccttgtagaaaattgacagattgaccttttttggatcttacatggagacggcggtgccggtttttccggcgatgccgtccttggccttctccagcagggtgatgagggctgtgcggccgggcttggacgcggcgaacttcacggcagcctggaccttgggcagcatggagccgggggcgaactggccttccgcctcgtactgccgggcctcctccggcgtcaggtgatccagccacttctgatccggcttgccgaagttgatggccaccttctccacggcggtgaggatgatgagggcgtccgcgtccaggctctccgccagcagctcggaggcgaaatccttgtcgatgacggcgcctgcgcccttcaggtggttgccctccgtccggtagacggggataccgcctccgccgcagccaatgactacctggcccgcctccatcagcgtacggatggtctcgatctccacaatggctttgggtttgggagaggccacgcagcggcgccagccccggcctgcgtcctccatgacgcagttgccccggcggcgcatctcctccgcctcctcctcagtcataaaggtaccgatgggcttggagggattctggaaagccggatccgccgggtctacctccacctgggtgaggacggtggccacgggcttttggatgccgcggttcagcagttcctcccgcagggagttctgcaggtcatagccgatatacccctggctcatggcagtgcagacggacatgggggcgatgggatggctgtgatcctcccgggagagggtggtcatggcgatgttgatcatgcctacctgggggccgttgccgtgggccaccaccacctgatggccctcctgaatcaggtccacgatggccttggcggtgtgcttcacagcgaccatctgctccggcaggttgttgcccagggcgttgccgcccaaggcgataacgatacgtttgcccatagttggtgtatcccttcttcacaaatgatagtggtcgaacctatcagatagttttggcgggaacgcccgcgctattcccgccaaaacttgaaatttttagaacgatcagaacagcttccgcttgctgccctggtccagggccatcagcgcggagaccgggtccttcactttgctcatcaggatcatggccgcgatgatgtagggcttgtagctggcctccttgtacaggggcaccaggtaccggtcgaacacggagttgtccacctcgccctccgggcagctgaggccggtgatatcggcgggcaggcagtgcaggtacagggccttgccgttcttcgtccgcttcatcatctcttcggagcaggtccagtccttgtgctgggcgttctgggccagcagctgcttctccagagcgtcgatacccgcctggtcaccggcctgatacagcttggtccgctgctccatggcggcaaagggcgcccagctcttgggatagacgatgtcggcgccgtcgaaggcctcctccatggtggagaccttcttgtaggagccgccggtggccgccgcgttcttcttggcgatctcctccacctcgggcatcacatcatagccctcgggatgggccagcaccacgtccatgccgaaccgggtcatcaggccgatgacgccctggggcacggacaggggcttgccgtagctgggggagtaagcccaggtcatggcgatcttcttgcccttcaggttctccacaccgccgaactcatggatgatgtgcagcatgtccgccatgcactgggtggggtggtccacgtcgcactgcaggttcaccagggtgggctgctgttccagaatgccgtcccggtagccctccttcacggcatccatgaaggtcttctggtacttgtggccctcgccgatgaacatgtcatcccggataccgatgacgtcggccatgaaggagaccatgttggcggtctcgcggacggtctcgccgtgggcgatctggctcttcttctcgtccaggtcctggacggtcagacccagcaggttgcaggcggaggcgaaggagaaccgggtgcgggtggagttgtcccggaagatggagatgcccaggccggagtcaaagatccgggtggacttgttccgctcccgcaggtcccgcagggcgtcggccacggtgaagatggcctccagctcctcgtcggtcttgtcccaggtccagtagaagtcggacttgtacatgttgttgatgtgcagcttttccagatgcttggccagctcgatggtcttggacatattcagcactccttgtaatatgtgaaattgtagatgtatggcggctccgccgcagcgaaaggaaaaaccaggaaaagggtctagggaaaaacccaggtttttcccagttgatttgcctccggcaaatcaagcaaatcgaatcattttcgccgcggcgtgtacgtggcgaaaatgccttgacccagccccccttcgaagctcaccggatatcgttatccgtgaggctctgccggaactcggtgacgtcagcggtcttgttctcgggcttgtacaggccgggtactgcggcgtacagggcggcacaggtcaccagatcctgcttccaggtgatctcattgggggcatgagcctgggactcggcgccggggccaaagcccacgcaggggatgccatatcggccctggatggacacgcagttggtggagaaggtccacttgtcggtgaggggacggccctcccgcaggtgcatggcgtcccgcttctggtccgcgtcggcatggccgatgcgcttgtcgccccacagggcatggtgagcgtccaccagcgcctggacatgggcggcgctctccttgttgatccaggtggggaagaagcactccgtctcatagacctcgccggtccaggcgggccggtcatacatgtacatgctgaccttcacatcgtctccgtacttctggacggcgggcagctgccggatctcctccaggcaggagtcccaggtctcgccggcggtcatgcgccggtcgatggagatggcgcagctgtccgccacagcgcagcgggagggagaggtgtagaagatctggctgacggtgcaggtgccccggcccaggaactgggcgtcctcgtagtgctccggattgaattccggattcagcatcttcaccagacccttcacccggttggaggggccgtcgccgctctcgttcagggcccggacatcctggaggatgtcggccatcttgtagatggcgttgtcgccccgctccggcgcgctgccgtggcagctgacgcccttgacgtccacccggatctccatgcggccccggtggccccggtagatgccgccgtcggtgggttcggtagacaccacgaactcgatcttgctgcgggcgtcctcctgaccctggaagtccttgttgacgatgtactgccagcacatgccgtcgcagtcctcttcctggacggaacccaccaccatgatcttgtagccggcggggatcaggcccagatccttcatgatcttggcgccgtacacggcggaggccatgccgccctcctgatcgctgccgccccggccgaagatgacggcgtcgtcctcatagccctgataggggtcggcctcccagttgttgatgttgccgatgcccacggtgtcgatgtgggagtcgaaggcgatgatcttgtcgccgtcgcccatccagccgatgacgttgcccaggccgtcgatctccaccttgtcatagcccagcttctccatctccgccttgatgcagtggacaacctccttctcctcacagctctcgctggggtgagagatcatctctcgcaggaaccgggtcatgtcggcctgatagccttgggccgccgctttgatcgcttcaaaatccatatcgctgacctccatatcaatgtttggaatcccgtcatttccacatcacggattggcttacctatccctatcatagcataagaaaacaggatgtcaaacaaaaaatgagaaaacctaaaaatttttttgaatctccggcgcggaatgcgccgtccggccgaaatgattgcaaaaccaaagggcttgtgatatataatggtagagtaaaaagaacagcagatttgggatggggagagcttatgccgataccggaaaacgtggaaaacctgcggagagtttccgcaaagagcagcatttatcaagtggtatgcagctggatcatcacgggtgtgctgaagccgggagaaaagatcgttgattccgagcttgcgaagcgattcaatgtcagccggaccccggtgcgggaggccattcagatcctggagggacagaagctcgtctatgtggtgccgggccgggctacggtggtggcggatattgaccctgcggatattgaaaaatgctaccggacgctggcggagctgcagggactggcggcggagctggcctgcggcagcctcacggaccgggaactggagcagctggagcggattcacgccgcctttgtggatgcctgcggccgtaatgacggcaccgatgcgatcacgcaggacaacctcttccatgacgcgattgtccgcggggcacacaacgagtatgtggaggaattttcccacacgatgatcctccatatccagcggatcaaataccattatttccactgtgaccggctgcgaaagatttccgtttcccagcatggggaaatccttcagaccatccaggcccgggacagcgcccgcgcgaaggagctgatgcggagtcactggctctgctccatggaaaatagcctgcgggatgttgcgggcatgatccatggagccggcgcagaatccggacaggatgttctgacaaagtaaagatgggaagaaaaagccagagagaggacgcggagagaatccgggtcctctcaacgttttctgggcgaattccataaaattgtatccggcctctggtacgttccgtagaaatcctttggagaggccgggctttcgttgacttccacaagagtgcggttcataatgaatatgcgatatattacatattgcatataaagtatgacagaggttgagaaaggagcagagacatggacagagaccagcggctgattgcgttttgccaacaggctgttcgaatccccagtccctccgggcaggaacgggaagtggcccagctgatgaagcgcaagatggaagagtatggtttcgacgaggtgctcatcgacaggtatggcagcgtactgggccggatgcggggccgccggccgggaaagaccatccttctggatgggcacattgacaatgtggatgtgatcgacgccgacgagtggacccatgacccctttggcggcgaaatcgaccaggggcggatttacggccggggcacatcggatatgaagggcagcgtgacggccatgatctctgcggttgcccactttgccgaggacagcggccgcgactttgccggagagatttgtgtgtcctgcaccgttcatgaggagtgttttgagggggtctcctcccgggagattacccggctggcgaagccggactttgtcatcattggcgaagcgacgtccaccactgtcaagatcggccagagagggcgcgcggaggtggttgtggaaacagagggggtgagctgccattcctcgaatccggacaagggcgttaatgcggtctaccacatgatggctgtgatcgaggagatccgccggatcatccccaacgagcaccccattctgggaaaagggattctggagctgacagacatcatctcgtccccatatccgggcgcctcggtggtcccggccctctgccgggccaccttcgaccggcggaccctgacaggggagaacgaggccgtgattctcggccaggtggaggaggcaatcgcccgcgccagggaaaagatccccggcttgaaggcgcggacctatctggcagaggggaaggaggtctgctggaccggggaggccatcgccgcgaagcggtatttcccggcgtggctcattgatgaggacaatgaatatgtgcagaaggcgctggccggtctgaagaaagcgggaatcgaggcgccgatctctcacttctctttctgcacaaacggcagccacttctgtggcgaggcggggattccctgcatcggctacggcccctctttggagagcctggcccatgtgcgggatgaatacattgaaattgagcagctgacaaaggcatgcagaggcttcgccagcatcctccgggagctgacacagtagagcgcggactagaaatcacgaatttaaaaggaatggttatagcattggagtaaatctgattattattgataaggagaatggaccgtatggaacagattttgaaatcaatctccagctttctgtggggtgctccagtcctgatcctcctggccgccgttgggctgctgtttggatgtaagacaaaatttttccagtttcgcaagttcggctatattttaaagaatactgccggcgagatgtttaaaaaaggcggcggcgcaaaagggaaggaaggaacgctgacgccgctgcaggcggtgagctccgcgctggccggctgcgtaggaacggcgaacatcgcaggcgtggccaccgccatggtggtgggcggccctggcgccgtgttctggatgtgggtcgtcgccctgctgggaatgctgacgaaatgcgttgaggttacgctgggccagtactaccgtgtcaagggagaggacggcgtttattatggcggccccatgtactacattgagcggggaatgggcagaaagtggaaacccctggccgtcattttctctgtcactatcattttgggcggcctgggaaccgctgcgttcgcccagccctataccatgtccaccgctgtgcagaacagcctgggaattcccgcatggattaccaccgtggcggcggccgtcatctgcggcgtggttctgctgggcggcgtcaagtccatcggcggcttctgcgagaagctgacccccgccatgtgcctcatctatgtggtgggagtgctgggcgtgatcatcataaatctggaacatgtgcccgccgcctttgcggcgattttccgctatgcgtttgcacccatgcccgctgtgggcggtttggcgggctccacagttgcgctggcgctgcggcagggcgccgcccgcgggaccttctccaacgaagcgggctgcggctcatcgcccatcacccatgcgaccgccatcaccgatcacccctttaaggaggggatgtacggctgctttgaggtattcgtggatacgctggtggtatgcacgatgacagccctcggaattctctgcgcgggccctgaaatctggcagtccggcctggaggcggaggcgctgaccatggccgccttttccacagcgtacggcagcacggtcggcaagctcctggtcaccattcctctggcgttgttcgcattctccactatggtggggtgggagatcaattatgaatccgcgttcttctatttgtttcccaagggaaagcagtccaaggtgttcaagtacgccatccgcatcctgtggctggttcccggtttcctggctctggggaagacgccccaggtgatttggaccattgtggatatagtctcgggcttctggtgcatccccaacgccatcgcactgctggccctgtccggtgtgttcatgaggatttaccgggattatgagagcaaatacatcagcaagaccaagccggtctcccagccccttgagtatgtcgggaaggattgactgtcaggcggcgcttgggcgttgacaggccgcttccaagcgcagaaagctgtggacagagcatcaggcggcatccgcaaacgacgtggatgccgcctgatttttgggaccggcggagatcaaacacttttttcgcagacctaaaaaaatatttgctaaaacattgcaatctcggctggatgctggtatgatgcagatatgaatatcgctctggaaagtgagaaggtgatccccttggagagcaaccggctggagatgctcaagcagattgcagatgccttggcggcccagttcgggccaaactgtgaggttgtgattcacgatttgtccgcgcagaatgcggaacaccccattgtctatattgtcaacggccatgtcacaggccgcaaggtgggggacggggcctcctatgtcgtggtggagcagctgaccaccaatgacccggcgcctcgggaccatttggcctacctgacccggacgccggacggcaagatcctcaaatcctccacagtctatatccgtaacagcaagggcaaggtctccgccattctggccatcaactacgacatctccaagctgctgatggtggagagcgcggtccacgatctgatctccaccggcgaaccccagcaggaggaaccggagaaaatcgtcaacgtcaatgatctgctggaggagctgatccagcagtcggtgtccctggtgggcaagcccgtggccctgatgaacaaggaggacaaggtgcgggccatccgcttcctgaatcagaacggcgcgtttttggtgaccaagtccggcgacaagatcgccaagtatttcggcatctccaagtacactttgtattcctatatcgacacaaaacaacaggagggcaagtaagtatgattgatctgaccatcaacaagacgggcctggagcacaatctccgcaaggcgaaggaaaatcgcatcatcatccccaccatcgcccagatgcagcacccggagaccatcccggagaagatccgggagcggctgaagaccgtgggcctctgggatgtggatcccctgaacctgttccgcatcacctggaagaatgaggccaaggagagcggcggactgttccaggcggtgcccaactacatcgagctgcccccggcgctcaccggcgtcccctgccggatcgtggccatggtgggcaagtggttccccaccggctgccacaaggtgggcgcctccttcggctgcctggccccccgtctggtgaccggccagttcgacgtgaacaggcacaaggccgtgtggccctccaccggcaactactgccgcggcggcgccttcaactcccggctgctgggcgcccagggcgtggccatcctgccggcggagatgagccaggagcggtttgactggctccatgagatcggcgccgaggtcatcgccacccccggctgcgagtccaatgtgaaggagatcttcgacaagaccaacgagctgaagcaggatccccagtacatgatcttcaaccagttcgaggagatgggcaaccccctgtggcactacaatgtcaccggcaacgccctggcggatgtgtacgaggccatcaagcgccccggtgaccggttcgccggcgcggctttcacctctggctccgccggtaccatgagcgccggtgatctgctgaaggaaaagtatccccatctgaagctggcggtgggcgaggccctccagtgccctaccattctggaaaacggcttcggcggccaccggatcgagggcatcggcgataagcacatcccctggatccacaacgtgaagaacaccgacatggtcatcgacatcgacgatgaggacagccagcggctgctgcgcctgttcaacacccctgagggccaggcgtatttgaagaacgagctgcacctggacgacgagctgatcgagaagctcacctggctgggcatctccggcatcgccaacgtgctgtgctgcatcaagatggcgaaatactatgagttcaccgagcgggatgtggtgggcaccgtcctcaccgactccgccgtcatgtacggcagccgcatccaggagctgaacgaccggtatggcgcctacaatccccatgaggcggccatggaccatgcactccacatgctggggctgaagctggacaacatgcaggagctgacctatgcggaccgcaagcgggtccacaacctgaagtattacacctgggtggagcagcagggcaagaccgtggaggagctgaacgctctgtggtacgacacggagggcacctgggacaccgtccacgcgcaggccaaggacctggacgacctgatcaacgctttcaacgaggccaccgggctgctgaaagacctgtaaaacgccgcagggcggggcaaccgccccgccctgcttatttatgtctcctccgcgcggatataggcatcctcagcctcctgctgaatgcggaccagaatatcccaggcccggctggtctcctgctggtccagggccttcagagcgtcggcgatgccgttgaacaaaatcgtataatattgggggaaattttcgcgttccatatccgccacctccataatatgtattatattgcactataaattgtaatgcaatatgcaatattataaacgtgcgcataacgcaatacgattcgtcatataaaaatatggcgaggtgtgctatgcggaaattcaaaattcctaaaccagaatcaacaacgaacaaaacgattcgtttccccaacagcgttattgacgcggtagaggaggcgattcgtggaacagaatgtacgttttccgcctttgtgatcgaagctacccgggtggctcttgagaatcttctggaggaggaaacgtcaaaagaggagtaacgctatgaaacacgttttgtacggcaaatgcgtcaagtgcggcaagacctacgacgctgtgccggatctgaccaactgcgaatgcggcggcattctggacatcgtctacgattatgactacatcaggacccggctgacgaaggaaaagctggcggcccgacaggaccataccatgtggcgctaccgggagctgctgcctgtggaggaggacacgcccaacacccccctgcgggtgggctggagtcccctgtacgaggagccccgcctggcggagcagctgggcctgaagcgcctgtgggtaaaggacgacggccagaaccccaccgccagtctgaaggaccgggccagcgccatggcggtggccaaggcccgggaggcgggggcgaaggtgatcgcctgctcctccaccggcaatgccgccagctctctcgcgggcaacgccgcagcggcaggcctcaagacctacatcttcgtcccctcccgggctcccaagggcaaggtggcccagctgatgacctttggcgccacggtcatctccgtccagggcagctatgaggagacctttgaactgtccaagcaagccattgaccgctggggctggtacaaccgcaacgccgccatcaacccctacctctccgagggcaagaagaccgtggccctggagatcatggagcagctctcctggcaggtgccggactatatcgccatcagcgtcggcgacggctgcaccatcgccggcctctggaagggcctgaaagacctgtatgccattggcttcattgaccgcctgccccggctgatctccgcccaggcggagggctgctgccccatcaaccgggccattgcggagaacaagccctgggagcccatggaggagaacaccctggcggactccatcgccgtgggcgtgccccggaatgcggacaaggccctgacggcgatccgggagtcggacggcatcgtggtgaatgtctccgaccaggagatcatggccgcccagcagctgctgggccggacctgcggcgtgttcggagagcccgccggcgtcactggcgccgccggcgtgaagaagctctgcgagcagggcgtcatcggcaaggatgacacggtggtcagtgtggtcaccggcaacggcctcaaggacgtggccaacgccattaaggccgcgggagaacccatctccatcccttccgacatggaccgcctgctggtggcctttgcagaaaaaggcatcactgtggaataagcggcaaggggccggcgggagaccgccggccctttttctcgaaaaattttctgatccgcgcaacgatcctctcccgttttccgatgatataggtgaaagcagctttcataaagagagggactaccgtagcggatacggagaggaagcggggcgttcctccgggaagggcctgctgggcccggtcagcaggcggcacagagccttcttgacttttcccgcgcagattatataataatgtacggtgcctcccgggcaccatccacctgagggaatgagaaagaggaggcacctgatatgacgtatcccatgaccgtggcgggcctgcgccgggacctgcccatctgcaaagtgacggatgacctgtacatcggcgcgtttatcgtgttcggcgatgcggagctgactgtggcctgcgcccgggagcttttgaagctggtcccggcggaggactatgactacatgctgacggcggaggccaagagcatccccctgattcatgagatggcccgccagtccggtgcgaagaagtatttcatcgcacgaaagggtcctaaggcatatatgccggatcctatccacgtggaagacacctccatcaccaccgcgggaacccagcggctgtatctgggccgggacgatgcggagctgatccggggcaagcggatcctgctgatggacgatgtgatctccaccggcggttcccttcacgccatggaacagctggtggccctggcgggcggcaccgtcaccggccgggtggccgtcctggcggagggtgaggccgcagagcgcagtgacatcaaatttctggaaaagctgccggtgttccatgcagacggtactgtaaaagactgaagtgaagagagaccgggcgcgccgctgactcgcggcgcgcctttttccgcatacgcttgcaaaatcctggaagaatggtagaataaaggcacgatgaaaacgaagcatgtggtctattgacttccgcacgtcaacgcgccggcggcagtgcgctgcaccgccgccgtcaccggccgggtgccctccaggtgccgctgtggtttctgttcagcctgcctatgctgtaccacatcgtggtggaggaccggcagaaagtgggctggcctgtccatgactggctgccggaggccagcgccttgtgctgtatggaggtactgccgtactgttcgctggctatgcggcgccggtatccggcggaggggggagtacgtccgccgctttggggaccgggacgacggccacctgcttcggagcctgttctgcatcttcgctgtgtcgccctatctgatgaagacccggaacatcgcccaaaactatatccgggacgcagtggagatcgcccgagcagaacaggatatcacacagaagcgggcggcggggatggagcacttcggcctgctgcacgtgcggctggcggtctatgtgcgaacggacctgtgcccgggaccgggagatcgaggtgaacatgaccgtcaaaaaggagatgtccccggacacggtcatcaagctccggttcgacccatcggacacggcggacgtggtctatcagcggttcaatgccaaagtccaggaggtgaagaacgtcttggaggacacctccttcggtgcgctggccggcgcgttccatctggcgccgggtctgctgctgaaattcttggtgtgggccctgcaggtcagcgactacttcggctgcctgcccggatccatcacccatctctcgcacttccacgggtcgttgtacatcacatttatggcatcgctggggattccgcccattttccatcgcctgtacgatttcggcaatgtgccggtattctggtctttcggccggaagcggcaggcgtttgagtaccagtgggacggcacggtggcccggcggaggtaggtggacggctgcttcgtcacggacgagtggattgtggacggattctatttcgcggtcgccatgcacagttttcagaatctgatccacggtccctggcagctggacgagccgccggaggaggccgtgcaggatcagccctgatatagagaggaggtcgtttatgacggaccacaccgtaccgcccatcggaatgcggatgatcaaaaccgcggcggcagtgctgatctgcctgctggtgtccatggccgtggaccgggaggatatgcgcatctattcctccatcgcggcgctgctgtgcgttcagccctatgcggaagatacgaagcgcatggccatccagcggattgtgggcacagccatcggctctgtgttcggcatcgccacgctgctgctggagatggccctggatatccaggggactttggtgggctacatcgtcatcgctgcggtgaccgtgcccaacctgtggatcgccgtggtgctgaagtcctccaatgcggcggccctctcaggcatcgtgttcctcagcatcaccgtcacccatgtgacggatgccagcccctggatcttcgcctggtaccgggcgtcggagacgctggtgggcatcgcggtgggcatcgccgtcaacgccttccagctgccccgccggaagcggcgggacgtgctgttcgtctccggcctggacggcttgctgctgacggagcaggggacgctgacaccgtacagccgggtgagcctgaaccggatgctggacgacgggatgcagttcaccctgtccaccatgcgcacacccgcctctgtgcgggaggccacccgggacctgcggctccgcctgcccgtcatcgtcatggacggcgcggcgctgtacgacatggagaagaagcggtatctccatgcctgcgtcctgcccagggagctggccctgcggtgcgaggcggtgttccgggcccagggcatccactgctttctcaacggtgtactggatgataacctgatgatctactacggggaattccaccacgagacggagcgggcgatctttgagaagctgcggacatccccctaccggaattatgtgagcagaagctactacaaggattgccccattgtgtacctcatgggcattgatctgacggagcggatgcaggcgctgtatgacgcactgggggaggcgggcctgttggaacaggtgaaggtgcggttctaccctgcggcggagtatcccggatacagctacctgaagatctatgagcgatccgcctcacgtgaggccatgctggagcggctgaagcaggatctgggcatggagcggagcgtggtgctgacgacgcaggagggctgcggagacgtggtgatccgcggcggcgccaaccaggcggtgaagcggctggggcggctgtttgagccctatctctgggagcagaaataacacggacggagctgcggctccgtccgtgttttgcattcggaaagaaaaccggagcagggacttgacaagtgtggaagcctgtgtataatatgaagtatccttcatgtgaaagacgcttcacgagaagggaccttcacatttatggaaaggggagagagaccatgaaaaaccgtgtacgggagctccggaccgaggcaggcatgacccagcagcagctggcggatctggtccacgtgtcctcccgcaccatcatctccctggagaaggggcagtacaacccgtccctgctgctggcgtaccgactggcgctggtgttccgcaccacggtggaggacctgtactgcctggcggagaacaaggaacaggaggaccgggaaaatgaggaatggacataagggccgtatggcctgcggaattctggaactgatgctgggcgtggggctgatcttgtacatctgtctggcggaccggcagcggattggtctggctgcggtggccgcggtggtggtgacggcgggacttgtgaccttctgtaccggtgcaacggcggttccggcgaagcgtaaggaggaaactgtgcaatgagaatttattacaaaaagaaattttgggccggcgtgggagctctgctgctgggcctggccctgccgggcacctgtttgttcgtgggctgggagcggttcgacctgaaggacgccgtgctgacaacgttcatggtcctcagcggaatcagcggcattctccggagcctggaccgggagaaggcccggcaggaccgggacgaggaccgggacgagcgcacccggtacaacacgtaccgcagccgggccctcacgttccgggtgctgttttgcctgaacttcgtcatactggccgggtgcttcatcggttggtggcggtcaggtgaacaggaagtctacatccagacggctgttccctgcatggtgctgtttatcgtgggctggatcacccggatcgccagcgatttctactatgagttcaaggggtgaaaatgagatgcgcatttataataagcggaattttgctgccgggatcctcagtctggctctggcggtggcttgcggcgtggtcctggcggtgacgggattccagacgaaatggctgatcgccctggtgctcctgctggccgctggcggcttcgatctgtggtggtctctgtcccgggagtccaggctcccgcgggtggatgagcgggaccaggccgtcagccggaaaagcgcctggctggcctaccggattgtggctaacggctgctggatcgtgagtcttgcggccctggtggtctatggaatcagccggatcccggcagctctggcggtgaccatcacgctggacgctgtgaccatcggggcttttgccgccctacagggggctgaagtctactatgaaaaacggatgtgaggccgccggccctctggaaaaggagaacgtatggatcgaagcgaagatttgaaacaggtgcgggacctgcatctggtccgggatgagcgggacagggaggtggaggcggccgccggactccgggcgggaaacgcggtggtgctggtgagccagctgctctccgccgtctgcctgctccaggatgatccggcctggatggcgctgctgtccctgacgctcgtctgggggggcgtgaagggcttctggcgattcagacaggaccaggagaggatctatttggtgtggggcctgctgacctgcgccggagcggcggcgctgctgggactctatttccaccgggcctggtctgccgggatgtcgttcaccagactgctgggctacgcagtgctgtgccaggtgctgacggtggccgccggactgttatttgtggcgctgctgctgggtatcttctggctggcccacaagctagggcatatagagggagagcgttgggagcagtatttccagtccgtgtccaccgccggacttctgctgcgggtgggtgctgtgatggcggtggccctggcagcggtggcggccctcagcgttcccctgttcgcccggttgggctttcaggagccgggacttctggccgcgctgttttttgtggcaaggggcgcgtacctgcttaacaaattcagccgccggcgggacgaactgatccagaagctcctgaagctgaaacgctgagctgcttcagcctggtgaagcggcacgggggcagacttgtacaacctgccggaatctctcggtgtttgcagggagaattttctccagaggtgcctattatgcggactgccgtgagatgctatcataaaatggaaatcccatcgtggaaaaacaaatactgagatagaaataagtccgctgggcgtagtctatggagcgataggctgcgccctctttttctgctcaggacaaggagtgtttcgatcatcatgccaaaaacaactgtacagaaagtgatcttcggtctgctgatgtcctttttcatggtgctggccatggagatgtacaacacaggcctgcggaacggcggtcttacaaacgccgggatcctgaacgccctgcgggagctgccgctgatgtttgcgctgtgcttcctgaccagcacagttgtcggagaacccctggccgcccgcctggcggcacggctggcagtgccccgggagtggccctttgccgccgttctggcccggtccgccatgacggtgtgcgtcatgtgtccggccatgagcctatgggctacggtgatcttccagcagccggggatcgagttggtgccctcctggctccagacggtggtctgcaattttcccatggcgtttttctggcagatctttttctgcggtccgctggtgcggcggctgttccggctgctggtgccctccgcggcgcttgtacccgcctgtgcggaagaggcggcggaatgagggacatgtgcaagcggtcccggacgctggtacgtccgggaccgcttgccattatccctccgggtgcgtttttaaataggtgaggtagccctctagaatcagcgatgccgccacagcgtccaccacctttttccgcttcttggcgttcttgccgctgctcatcaggatctggtgagcgtcgatggtggtgcgccgctcgtcccacaggaccaccggcaggccggtggtctccttcagcagctgccgcatggcctgggccttttccgagcggggcccgcgggtgccgtccatgttgatgggatgccccagcaccagccgttccaccctgtgctcctttgccagaagtgcgatctgtcccgtcacccggtccgggcggtaggcgttgatgacggtggtgaagccggccagcaggccggtggggtcggagatggcgatgccggtgtgggcgtcgccgtagtcgatggccatgatgcgcatggtggtctcctttccagggaagaataaacgccggtatggcgcgttttgcctgcccacaggataccacatcggggcaggccgcgcaaggcggaaaaaacctgacatttttttcaaaaagaggttgaccggcgccttgacctgtgttacaatcattcttacctgtgaaaaagggttttcttttcatgcgcttttttcgcttttcagccatggaggtctgcccgccaagctgcagggaggcaatcgggactctcccggtccgccggagagagagccccaataataaggaggtgccgttagatgcgcgtgaaggtcactttgagatgcaacgagtgcaagcagagaaactacaacaccatgaagaacaagaagaacactccggacaagctggaactcaacaagtactgccccttctgcaagaagcacacgctccataccgagactaagtaaacggtcacgaatgatgagaaagggcgtgtaaacgttatggcagaagaagtcaagaagaaaagaagccgcggtcagtggttccgcgaaatgaaaagcgaactgaagaaggtcgtctggcctgaccggaagaccgtgatgaaaaacaccggcaccgtgctgctgtgctccttggccatcggcgtgtgcatctggatctttgactttgtcatggtcaccgctgtccagatgattctcagcctgttcgcctgattgaggtagaaacatgtcagagagcgcgaagtggtatgtggtgcatacctattccggctacgagaacgccgttaagaccagcattgaaaagttcgtcacaggccgcggaatggaggacatgatcctgcggatcgaggtccccatggagacggtgacagaggtcacggactctggcgccaccaaagaggtggaacggaaggtattccccggctacgtgctgatcaagatggtcatgactgacgatacctggcatctggtgcggaacgtccgcggcgtcaccggcttcgtgggctccgccaacaaagccatccccctcacggaggaggaggttctggccatgggcatggaaaagcatgagatcgtggtcagatacaatgtgggcgaccatgtgaagatcgtggatggcccactggccagctttaccggcgtggtggaggagatcgagcccgagaagaatcgggtcagcgtgatggtctccatgttcggccgcgagactccggtggagctggagctggaccaggtcgaggtccaggactgatcgaatatctgccgggcgccccagggcgccggcccgccggacattccggcggaaaagtgggaggggctgaactgccccgccaaagacggccccgtgccgccaccacattcatagatttaggaggtgctactccgtggcacagaagattactggttatgtgaaactgcagatccccgcaggcaaggcaactcccgcgccccccgttggtcccgctctgggccagcacggcgtgaacatcgccgccttcaccaaggagttcaacgagcgtaccaagaacgacatgggcatgattatccccgtggtcatcactgtgtatgctgaccgctccttctccttcatcaccaagacgccccccgcggccgtcctgatcaagaaggagtgcaacatcgagtccggctccggcgtgcccaacaagaccaaggtggccaccatctccaaggcctccatccagaagattgctgagatcaagatgaaggacctgaatgcggccagcctggagtccgccatgagcatgatcgccggcacctgccggtccatgggcgtcgtcgtcggcgactgagcccggctttcacagaccgtttcaaacagcgagcggcccgtggggccgcaccatacagtgggaggattcatttccgaagaaccactatgaggaggaagtaacattgtttagaggcaagaaatataaggaaagtgccaagcagatcgacaagaccatgctgtacgacgctgctgacggcatggcgctgatctgcaagactgccagcgccaagtttgacgagaccgttgagctccatgtgaagctgggcgtggactcccgtcacgctgaccagcaggtccgcggcgccatcgtgctgccccacggcaccggcaagaccgtccgggtcctggtgttcgccaagggcgacaaggccgacgctgcccgggaggccggcgcggattacgtgggcgagatggatatggtggagaagatccagaaggaaaactggttcgacttcgacgtggttgttgccagccccgacatgatgggcctggtgggccgcctcggtaaggtcctgggccccaagggcctgatgccctcccccaaggccggcaccgtcacccccgacgtggccaaggccgtgcaggaggtcaaggccggtaagatcgagtaccgcctggacaagaccaacatcatccactgccccatcggcaaggtgtccttcggccccgagaagctgactgagaactataacgcgctgatgggcgccatcgtgaaggcgaagcctgcctccgccaagggccagtatattcgcagctgtgtagccgcgtccaccatgggccccggcgtgaagatgaacacggcgaagatgatctgaggctgttcggaggggagctggctctcctccgaacaccccatcgccgcgtcaaaacaaactgcgcttcatccgtttctgcctgtggtgaaaccggatactgctccgtttgtttttccttttccgacaaaagctgggcttttgttggggcccgacgtggtcactggcgtgcgcaccccggtgcgcgggacgatgaattttcgccgcacacatgttgcggcaaaatgattcggttttcgtcttccgctgcaggcggaagaaccggaaaaaaccggaggtttttccgggcatttttcccggtcctgtgggatctggggaaatctgttatttagttcttgacaaatcgtcgagaattaaatataataccagatgcgttccaaagacagcaggtggcatgagccataaatcctgccgagggcggcaaacttgatttgctatccgtccctgtgtctttgcgcacagggacggttcctttttttgaacgcaccgacaattttcctggaggtgaacactagaatgcctaacgcaaaggtcttatctgaaaagcaggccatcgtggccgagctgactgagaagatccagaaagcttccgccggcgtgctcgtggattacaagggcatcaccgttgaggaggacaccgcgctgcgcagagagtgccgggagaacggcgtcgattacgccgttgtcaagaacaccctgctccgctttgccttcaacaacaccggcctgaacgagctggacgatctgctcaacggcaccacgtctctggctctgtgtgaggaggatgtagtcgctcccgcccgcgtcatgagcgactatgccaagaagctgaacgacaagttcgagatcaagggcggctttatggacggcaagcccgtctctctggagaccatccagtctctggcttccatccccgctctgcccgttctgcgcgcccagttcctgggtactatgctggctcccattaccggtctggctgtggtcctgaagcagatcgccgaaaagggcggcgagcccgtggctgtcgctgccgaggaagctgcccccgccgctgagtaattgaggcggcaagttcttacttttaaattttacaattaggaggctattacaatgtctgagaaagttaccgctatgatcgaagagatcaagggcctgaccgttctggagctgagcgagctggtgcacgctctggaggaggagttcggcgtgtccgccgccgctatggctgctcccgctgccggcgctgccgctcccgccgctgaggagaagacctccttcgacgtggtcctgaccggcttcgacgccgctgccaagatcaaggtcattaaggttgtccgcgagatcaccggccagggcctggccgaggccaaggctactgtcgagggcgctcccaagaccctgaaggagggtgcttccaaggaggacgccgaggctctgaaggctcagctggaagaggctggcgccaaggtcgagctgaagtaatcgaacttccatacttgggcttctgccttttatcctaggcagattctccctggaatattgacccgatgatgaaattgggcctgaggtaatttacgttaccttgggcccttttttgtgccctgaaacagaagatatgggtactcaagccgttttccgaaacaaatcaaaataaaatctcttcacaccatcctgtcaaaatttgagggagaatgcggcaagaattgaagggagagacacaatactggagagaaattccctgtccaatggacgtggaatttaacccaaaagctccccatgcccttggaaggcatggggagcttttgggttaaattcatgcagaactctgcgataatcctataacttttatatacatttgtagattccacattgtcggttttgcattttccactccccctagagagcattgcccactaacatttatgactttgaggctgtattcatttaataatatctgttgaatgtcttgaacagaaatctcgccgtccgcgatctcttcattcatagccgcccgttgaagcacaattcggagttcctccgaagaaagaattcttttccgaatcattggctctgcgatggttgcaaatgccgcagagacagcaattgtggttatcgtgcggataaaatgcgtcaaatctccctcggtatgaatcacagaggagggtcactggagcgataaagagacaccagtcagctcccggatcttaacaagctcctgctccctgattttctccagatcataattcttaggactgattggaatccgattggggttaatcttctttcgctttatggcaaacgctccgctatttctttggagtatttttgactatttctgtgacggccttaatttaacaatatatagaaatggaaagaatgcttgacgcggcagccgtcaaaggtatacatacagcatctgactgatttaaaacggcacttatttcaggaagcagacaaatctgtccaatcgcatttcggccagcagttccgttatcatagatatagaggccttgctctccggtaaaacatccatgcagaccttttctgcttgagtctcgtccctcttgcacagttccatccaaatcacacccttcctcaaaattttttcatgataccacatttgaggaatgagcgcaagggctcgcccatctcagcgggaaaagacagcattcaggaataaagtgcaacacattaaagcgtgcggcgaactggtttgcatagccgatgaagaatgagtccttttgaagaagaagcacaggactatatggatacggcaaaagggttagcagagagtataaaggaataatctgctgactgctatttaacaactatttgtaaaaaggcccggaggcattgcatcgcaatgcctccgagtcttgcctgcaaatactgcaaaaattgtgcaatcccactgaaacacttgtgtcccaataggttttccttttctggagttggctcccggagaatgcagctaatgaggcagcgacattttggcctatctcatcaaaaaatataaacttgggaaaacttctaggacgcagagggttacctaccctaagattttcttccaaagactccgttattttgatgcaaatgaaggcatcaatccgataatggtagactttatctataaaaatttcatgatatctttacacaatttgcatgttcccaaaatgaagttgcgaagcagagtttttcgtgatatactgaaaaatacaaaaattgctaatataacagacaccttgatgataaacaccaacctcaacagcatattcttggggagctttatcggttctaaacgagtgtgttccgagagaggaaggaaagagaggtgttcttagtgaagaaaacagaaaggatacctttcaaaatgagcaaacctcagcagttgtcggagaaatatacgaaggagattttccaagagatcaagtccggcatatattctcgggcagaccgtcttccctcggaaccagatatcgcaaagcactttggcatcagccggaccatggtgagggactgcctttctacactggaacgggagggatttatcagccgtaagcatgggattggtactattatcaatcagcatgtgttggatgtgaaggtgcggttggatctggaagaggaatttctggatatgattcgctccgctggctatatacctggtgtggcatttgtccgtaatgcgatggggaaagcagatgttcgtacagcgcagaagcttggaattaaagcgggggaggatgtagtaatcagtgtccgcctaattacagctgatggtgcgccagcaatctattgcgtagaccacattgcgcgtcggagtatcgtcgcaaaagaatatgacctttcgcttttggacagtcctgtatttgagtttgtggaacaatattgcggcacagagatttatatggacctatctgaaattagtgctgtggctgcggatgcagagcgggccgatgtgtttcagatcccacagggctctccgcttttgtacatcgatgaactgggatacaattttgtgggtcaacccattttgtattctcaggagtattacgcaaacggcatcttcaagcacacaattctgcgaaaaaaaatataaataccccagagttttgtgagagttcgagaaaatcggctctcttttttttcgcaaaagtgcattgatttggtggtgccgctttgatactataaatgtatatctatttgtattacaaatagatactacaaaaatgggggtgctaaaatggcaaaagaaacacagcttgtaaacagcggttcttttctggaaaagagattccatctcaaggaaaaccacaccaatgtgagaactgagatcattgctggattgactacgttcttgacctgtacctatattttggcggtaaatccggcgattctgtcctcaacaggaatggattccaaggcggtactatgggcgacggctatctcggcagctatcgcctgcatcgcaatgggccttttgactaattttccttttgccttagcgcctgccatgggactcaacgcatattttgcctacacagtctgcggtacgctggggctgtcatggcaaaatgccctggcctgtgtgtttgtggaaggtgttaccttcagtatcctcagcgttgcaggtgtacaggagcgcattgttaacggcattccagagtgcgttaagcaggctatttctgcggctatcggctttttcattgcattctcggggctgcataattctggtatcatagcctatgaccctgataatttgctgtgcctgggcaatttgcaggatcccggtgtcattctggctctattggggattctcctgacagcgggactggttattatgagggtcaaaggcgccatcctcatagggatattggctattacctttgcaggtatgctttttgaaaacccggctacaggtgctacctatacccaatggcagggtctggtctctttggaaaaccccattgaggcgctagcacctacctttggacaactgacatttgatggcctgtttgggggcggtgtggcggctatcattggtgttctctttgccatttttagttttttgtttgtggatatgttcgacagtatcggcgtgctggtaggtgtgggaatcaaggctggttttgtcaacgaaaagggtgaactgcccggcgcgggcaaagctctgtttgtgtctgcagcaggggctgcagtaggagctgtgttcggcacccagaccgtcacggtgtttggtgcagagagtaccacaggtattgctgagggcggaagaacaggtcttactgccattaccacaggggtgttctttctgctgtcgctgctcttcaccccgctgtttttgatgatccccagtattgccaccgccccggcactggttatggtgggtatctttatgattgagccgctgatgcatgtggacttgagtgataccaagactgctttcccggtattcatctgcgtggcttttatggcgtttaccttcaatatcgcctatggtatcctcttcggactgctggcttacactggcggacaggtctttgctggcaatgctagaaagctcccgatttccacttggatactgacaggcgtgttcctactgtatctgcttttggaaatcttttttaactgaggcccggcaggacgattcatcgggagtacatttcaatcaagtttccgaaaaacgggcaggggcttccaatccgattgtgggagggagtcctttgccctagaattggagaaaagcacatggggatcaaaaatagcattccgcgtctagacgctgtggataaggtgaccggcgcggcaaagtatacagaggatcttattcctattaatgcactggtgggaaagactcttcacagcaccattgcaaatggaacagtacgcgctattgatgtggacgaggcgtggaagatcccgggcgtagtggatattttaacttgttttgatgtgccggactgggagtatgcgacctgtggacatccgctttccctggatcccgcacataccgatgtggccaacaagcgaatactgaccaaacgagtgcgctactatggagatgagattgccgcagtggtagcagaaagcgatctggcggctcagaaggcactggaggctatccgggtagagtacgaagaactgccgccgctgctgacaccggaggctgctgtgatcagtgggattcctctgcatgaaaaatccccggataatcagggggggcgcatggattttatcattgatgagagccaaaatgtccggttttatcagggaacgttctccatggatccatgtatcggcggctatgtcgatttacgaggaacaaaatttcatgtaccggcccagcaacattgccatattgaaaacatctgttgctttgcctatatgagcgggcggaaaattgtagtggtgtcgcccaatcaggcaccccacaccctacgcaaacatatttccgatgctctgggtatccccacaggccggattcgtgtggtcaagccctatgtgggcggagcattcggcaataagcaggatatgttctatgagccgctggcggctttattcaccttacggctgggaggacggtgcgtggcctttgtgatgagccgggaggagacatttgtcaatagccggactcgtcatgccatggacatctgggcggcggcctgtgtggatgatacgggacgaatcacgcagaagggcattcgcctgaatgcatacagcggcgcgtacggttctaacggccacgctgtggccgcctatgcggtgactaactatttccagctttatcctgctttgggcaagcaggtgggagagtccgctacggtctataccaatatgccctcggcgggagctatgcggggctatgggattccacaggtggcctttgcgatggagtgccagatggatgatctggcactgaggtatcatttggatcctgtggaatttcgaaaaaagaatatgatgggcctgcatttcttggatccctttgaccggtttctctgtgccagcaacggtctggaacggtgcatcgaccgtgggtgtgagttggtggactggcaagcgaagcgtcaggcgtatgatgcgttcaaccatacatcgtccaatctcaagaaaggattgggcatggcagtgtttgcctataagactggggtctatcccatacaattggagacagcttcctgtcggatgctgctcaatgatgacggcagcctacagatacaggtctgtgctacggagctgggacagggctccgatactgtatttgcccaaatcgcctcggagattaccacaattccggaagagaacgtgtatgtagtctcctgccaggatacggatgtttctccccatgatgcgggggcatacgcttctcgccagacttatgtctccggcagtgcggtgaagcagacagcagagatacttcggaagaaaatcctgaacagggctgcctgtttgtacgaagcagattccaaagatcttgcccttgatggcggacggattacaggccgtgatggcgcagtcctggggacggtgagggatgtggcagtccgaatgcagtacaccaacagcacaaagataaacagcgaacatctgacggcggaatccacctacaccatgcgtcataacgcatttgccttcggtgcaagctttgttgatttagaggtggatgttcctatcggcaagattaaaatcaaccgcgtgatagcgattcacgacagcggccagattctcaatccggcgcttgctagagctcaggttcacggtggtgtggctatggggattggatatgctttgacggagcagatgctttttgaccccgagactggtaagatgcgaaacgacaacctgttggactataaaatcccgacagccatggacatcccacagattgatgtggagtttgtggagacctatgagccctccgccccctttgggaacaaagcattgggagagccgcccatgatcccacaggcaccggctatccggaacgctgtgctccatgccacgggcgtggccgtctatgagctgcccctgacaccggagcggctgatccacgcctttatacaagctggactgatacaaccactgtcgtgcgagcatatagcggagacataagcgggaggtatacgctatgtatgatattcgacaagtttatcagccaaaggacctgggagaggcactctcacttctggcagaacatccggatgccattgttatctccggcggaacggatgttttaatcaaggttcgggagcggaagtggaaagactgctctctgctgagtattcaccgcctgccgcagcttcagggtgtgcgccgggagaaggaagaactggtggtagggccgggtacctgctttgaccaactccatgaaactggagtgattcgggagcacgccttttgcttgtggcaggcggctgaccaggtggggagcccccagattcgcactgtggctacgctgggagggaatatctgtaatggcgcagtcagtgctgacagtgcgccgccgctgctggtactcaatgctaggctggaactcaccgatatcagccaaaccaagcggcaactggatatcggtgcgttttatactggtcccggacgcacggccttggaccgaaaaagggaactgctgacggcggtgcggattcctataatccggccgggatgcggcagctattacatcaagtatggaaagcgcaatgccctggagatttccactttgggttgcgcggcgtatgtggagctagatgcggggaaaaagacctttcgggaagtgcggatcgcttttggtgtggcggcgccagttcccatgcgctgtccggcagtggaagctctggtgaaaggactgcctgtggaccgacatacactgcgcctgcttggagatgcagtagggcgggaattgttcccaagagatagctggagggcatctcgagagctacggatgcagttgattcgggaattgagccagagagctgtggaaggggcggtcaaacaagcaggaggaattttgaatgaaagtgatccacatgatagtcaacggaacaccagtggagctggctgtccgtgaggatgagtgcctgacggacacattacgccagcgccttggactcaccagtgtcaaaaaaggttgtggggttggggagtgcggcgcatgcacggttcttctggacggaaaggcaactaatagctgcatctatttgaccttgtgggcagatggacgagaaattatcacagtagaggggctgcgggcaaaaaacggttgcttgcaccctgtacagcaggcgttcgtggacgaagctgcagtacagtgtggtttttgtactccgggattcattcttaccgcagtggaaatcgtcaattccggaaagaagtatacccgggacgaattgcgtaagttaatctccggtcatctgtgccgctgcaccggttatgaaaatattcttaacgccgttgagcgggtagtcggtgtcaatgcaaagtaaaatggtgggaataattcctaattatatctctgtctacctgtgtaaaatagtgaacaggttgtggtaactagtgacacgccattggggagacatcttggcagagtaagaaaacatcgaaatcacagaaacactttttgcgggccatgcggagcgcatactggcagcgcatgtgccgcaccagtgattgggattccttctggacctgtacactgtattccactgtagcctgagcaccatgagtattatctgctgggaaaacattagcatcactatttatgggatcaaggaggctctgctgtcacccataactggccttatccccaagaattcacttctttcttcccttgctgaaagacgctaggcagatgctataaaatatctagggaccaagtctcttcccggagttatcacgaaagattatgatgagctatcggggaggctggggctaacgcaatggaaatccaacgaaaggaaaaagccatgcgcacttttgaagaaattaaagataccattgagacggggcttgggaagcacccttgtgatttgaaattacagaatgttcgactggtgaatgtatattcatcggagatttataacacagatatctatatcaaaaacggccggattatctccatttcaccagaagcaaatctggaggcccaggaagtagtggagtgttgcggacagttcgcggtgccggggctcatcgatactcacatgcatttcgagtcaactatgctttcaccagaagctctggcttcagtggtggtgcctcaagggactactacactgtgcgcggatcttatggagattgcaaacgttgcaggagcggatggattgaaggctatgctggattctatttcccgcctgccataccggatgcttattgaagtttcctcacgagtacctacagcgccgggcctagagactaacggagcctatatgggggccgaagaggtacgcgctattatggactggcaggaatccatcagtctgggcgagctggatccctctaaaatcctgctggtgaaagacgaatacatcgaaaagattgcggataccttggcgcggagaaaaatcgtaaacggtcatgccatcggtcgcctggggcaggaactcaatgtatatgcttctgctgggatctctgatgaccacgagtgcgttaccgaggaggaacttctccaacgcctacgggtgggtatgagtgtgttggttcgggagggcagcaccgaacgcaatttggatgccctcatcggcggtgtactgagagagaagctgcctctggacaatctgatgttctgtacagatgataagcatgctggagagatccaacgggagggccacattaactataatgttgcccgggccatggaattgggtgtgggagaaatagacgcagtgaagctggctacgctcaacgccgcccggcatttccggctggaagatgagatcggatctattacgccgggccgcctagcggatattcttttggtggaggatctgcgggaaatgaagcctagccaggtgtattttgaggggcgcctggtagcgaaagattgcaagctgatccagacatgtgaagttggggaatatcctgaatggttgaaaaatacagtaaagctgaaacagctgattacggaaaagagctttcgggtccccgctcgaacggatcgtccccagacgcaagttacagttatagatctgattgaccggcagattatcaataaacggctaatcgcaacgttgccctgcgttaatggggaaatactggcagatccggtacatgatattttaaagctggccattgtagagcgctacggaaaaactggcggtgtgggagtgggatttgtacggggctttggcctccgggagggggctatggcctactccatgtcccacgatcaccataatatcgtggtagtaggtgtcaatgagctggatatggcacagagtgttaaggtgattcaggaaatgcagggcggactctgtgtggtccgtaacggcgaggtgatggcaaaaatgcgcttacccatcggcggattgatgagtgagcaggatgctggcacggttatgagggaattggacgggctaaatgctgcggcccgaagtctgggatgccgcgggagtgcccctttcatgactttgagctttatctcgcttcccacagtgccggaacttggattgacggatatggggttggtggatgtactggaacatcgactgatcccggtggaaataccagaaaaataattggggatttctggcggcgagttgaagcaacacatggttccggaggggctctcttggctgcgggcccctccatctgacatctaaaatattccttgataactcggatcataggctccatatttcctgtgctttgaagcctaaaacaaagaaggagaatggcgttactattctccttcttctaatttttgtgatgtatggcgcgaactcttttttggcgtaaaattctcttacttccacagtaaggtccagacttcttgtgagatactcagcattgtctgctttaaaatataccggattactttcgatactttctcaggtatttattttgatggctctggtagcacgctggcctgcagggactgcaaaaggatttgtgactatatgctcaaaaacagtttaggattccttgtattcagcaatatcatccaaattgcaatgaagagcagaacacaacttatccaaagtttttgtttcaatattttcatttgctctaagtctgcggatcgttttgctgtcaatcccgcatttttctctaagctgatacatagaaataccgcggctttccatagtagcccacaggcgatgaaagataatcatttgcttcacctctgtatttatacagtgtggggattataaacttgctttttaaggggatataaccctcatattctgctttagaaattaagaagtacggccctatacacgaaatgaacgtagtgggaactttgattgcccgagctgtgaaatgggggggcgggaagaccacatccgaaaaattctgggaatcaatatcacatgtaggaaaccctgtatgttcgatcaggatctcatatagcggtcttttaatatttttaccagagggacctgttcggaaggcgtaaagatacgactcaccacccgcccgattggatattaccccgcctccagtgcgtatcgtgacttgaaggactcattcaggtatctggcggggagtatttcatcaatggtatcctggcggatttagaaaaagaaccaagggaagcggacgtgcaggagtgcagaaggagccaaaaccatgccttatctcaaaaccggttccggggaaaatttgataaggagtgaaccataggaaatgcgctgtcagaaattatttgaaaagggatgtatcggtggagtagagatccgcaaccgtgtcgcaatgacggctatgggaaacggattggcgtcctgggacggcgaggtatcgctggaactgatccgattctatgaggatcgagcaagaggcggttgcggcctgattttcacggaatttactcggatggatgaaaccagcggcgcctgcaatccaaatcagctctgtatcgccacccgtaaacatatacgtagtacggagcgggtccgctgtcacggcgctaggatatttgttcagctctaccacggcggccgagagaccctgtctgtgctgaatgacgggaaacagcctatggctcctagcgccatcctcaactcggcatggcgcagttgaggggcaatgatatctgcgtcatcgacagcggcagcggcagggagacggggcggaaggcgcggcggatcttggacgccaacagatggcgcctgtccaactaccggagggctttgaggtgatcgccctctcagtttccttaaaggtgcaagattctatcccaattgactatggcagtggactgacagagcgttgagggcacattgtagtcaccaggtcgcatcgaaagacgcggtccggtgacttgtagcatatacagaaggctaccactccaatgtaatgcctttattggggtcaagctttgcaattttgaaacctgctaaaatgcaaatcagcgtaaagataggagtcatccagttctggaatgcatacgaatttgtgattatatcaactacgaggacgatctttgggtatgttgttcttcattctgtactgaagactttcggtgtgggagtagatataaaattattttatcagagtattctggataaggacataactagtacgcaggagacttattacgacggggcacaggcattgtatgacctgcgggtccttttgatctgcgcggtccacggatattgtctgggcggcttgtgctatcctgccggggcagatatttctatcgcagtgaaaggtggagaagttatcaatagctctgccaatagaaggcgccggatgatcaaaggagcttaggcccggctgatttcggcggctttctttttctcggagttcccgtcattttgcggtgtcaacctggctcaagaataaaggtgcttcgagacggaaacacggacatatccgctctgatttcaaagataatgcggagtggagcaaaggattgaagacttggggccgtcataacaaggtagcgcctacagttcaaggctgtccggatgggaatggatcatctgccatgaggagtgagcacatgaattgagagatcatgaaaaatcaaatgcttatattaaacaaaaattcaaggggaaaattgttgatattgcgatcttccttgacggcaaaaaaacacgtaaactattggtgttggagttcccaacaaaattgaaaagcctgcatatgctctccatctctcagctgtgcgggtgccaaaaaggaggaaatacataccggtacggctcacggtgcggcagtgtggagacctgttgtaaagcgcggcgcccatcgcggtaccgcgtgagaacgcatccgcggaggcggagcggtcagagccgggaaagatggcaggactgtctttggtaaatgtgaagaagatctatcccgcaacgaacgatcacaagaagtccaaaaagaagcacgagagcggcgaggagaaaaaggcccagctccaggtgaccaatgagggggttgtggctgttcaggaatttaacttggatgtggcggacaaggagttcatcgtgttggtcggcccctctggttgcggcaagtcgaccactctgcgaatggtggcggggctggaggagatctccagcggagaactgtacattgatgggaagttgatgaacgatgtagcccctaaagaccgggacatcgctatggtgttccagaactacgcgctctatccccatatgacagtgtatgaaaatatggcgttcccactgaagctgcgcaagcgccctaagagcgagattgacaaagctgtgcgtgaggcggcggagatcctagacattacgcagtacttggaccgcaagccaaaagctttatccggtgggcagcggcagcgtgtggcgattggccgcgctatcgtacgggaacccaagatcctgctgatggacgagcctctcagcaacttggacgccaagctgcgtaatcagatgcgcgcagagattatcaaactgcgccagaagatcaatactaccttcctctatgtcacccatgatcaaacagaggctatgactctgggggaccggatcgttatcatgaaggatggcttcatccaacagatcggtacgcctcaggaggttttcgaccatcctgccaatctgttcgtggctggcttcatcggtacgccgcagatgaatttctttgatgcggagttggttggaaggggcggccattatgctgtcgttttggatggcatgactgtagagctgtccgagaacaagcaacaacgtttggctgctaagggcgtggcggggcagcatgtcacactaggcgttcgtccgcagcatatctccctgcagtgtgagtccggctctgtcaaggcccggatggatgtatttgagatgatgggcagtgagatccacctgcacgccaatgtgaacggtcgagatatggtcatcattgtccctaccacagatattaacggcaactattccgatgctttcaccattggtaaggagattgacttctcattcagcggcagtacgtgtcacctgttcggcaacgacggcaagaacttggaattctgagtctttctcaatctaaagaatctgaagccgggctctcacgaaagggagaacccggctttctcttttgggaagagttgtattccatacgcctctggtctcgccgcctccaaagcagtggcggaaaaatggagacagtacaggctggagtggtgtgtctgtgccgtgagagtgtccggcctttcactggaccggtggtcagataggtgttgacctgctcttggaacacatagcgaacaccttgtgaggatagcggtcataatggctacaatgagtctgcttgcaaagaacatcgggattggggcaatcactagggttcgaagataacaagcagagctgaagctggtggacagggacagacaatttggagaaataccttgctgcttatctgaaaagaaacccagtgtggatttctttgctcggggctttctgcgcccaagcttgctgcgggcatttggagagggcgtctttgtcggcaatgaccgtaacatcctgatggagctggagaatggaagctggtattccgggagtcaccggtccaaaacagctggcgtaaatggcgtcggccttatcggcaccgctggcgatcagaaggatctttctggcttgggtaatggcttgcatccccatggagatggcttgccggggaacgtcctcctcccgctcgaagaagcgggtgttcgcggcgatggtgctttccgtcaggtcaacctggtgagtgtatttggagaagtgatcgtccggttcgttgaaaccgatatgggcattacggccaatccccagaagctgcaggtcgataccgcccaaatccgcaatcagacggtcgtaccggcggcactccgcatccggatccgcagccatgccatcgggaatatggatatggtcgggagcaatattgatgtagtcgaagaagttcttatgcatgaagtagtgatagctctgcgtattgtttgccgacagcccccggtactcgtccagattcaccgaggttgcctccgcaaagtccagatctcctttttcgtaccagagaatcaactggcggtagacccccagcggtgaggaacccgtagccaggcccagcacactctccggcttcagaataacttgggcggagatgatgttggcggccttgcgactcaagtcactgtagtctttcgcacaaataatcttcaatgaaatccctcctgtcgtatgtcacagactatttccggcagctgctatgttgccgatgcagctatgccgatgtgctcctccaatgcgaagtatccccgattcactagaatcagcaccctagcaccggattgtacctgagatgaactgggatacgcccgttctacacgggatcggaaatgcttgagaatgacagcctccgctcgaaacaggccgtcagaataagactcgatgttggatcttcgtatacagggggattctgttatattcttccttcggcagtgtccaaatagtatcagccagcagttccgaagtgacactctccctggccgcataaaagatacgtcatctatttccttgtgaagatagcggctgccaagggtgcaacagcgattctcttcctgcatggtaaagaggtgggaatgtcaccttgctcaaaaaacgaatgaatagaaataggggtgcggcctacgccattttggcatagacttgcgggcttcagcgttttggagaaggtcaaccgtcggcctttattgatcaattgaccagaggcccgaatagccgaaccgtaagtcgggcccacaggtagcccgctgctgctggccacaagaaagaccacacgaaaatcagcagccagaaccaccggggagagaagaacagcactacagcagggatgaccagcactgccaaaattgccagagaccggggcagccgcccaatgccttggactagggccgccttccacagctgcaggaagcgaagggagggattggcgttgattaccggcggcaggaaggccaaggccatcagcaggcagaacaccagaaacagcacgcctccccagaagaagagttggacagaagggggcagactgccgatggcctggaagtccagatagaacagatacgccaaagccaggatggccacccaacatttcgtggcgggcttgaagagctgccggaagtgggaaaagtacccccggatatgcatcggggcaccggccaccatgtctaccatggagctatatagcgcgcaccaggaggccccggcggtgaccactggcagggagcagagcagagtgaggatgctgaggacgaagaagtccagcagggtggacagggcggacatcacaggggagtccagatcaaacaggtggcgcacaggcgttttctcctttctgtagggcttccagctggcgcttgtagatcagcaggaaaacgatgtggatgaccaaggttagcgtccaggagacgggataggaccagtacaggctctcgatggtccccacagctttgaagatggtatacagccagatgacccgcagtccacaggcaccgatcagtgtggtgacggtggggttgatggttttgcccaagccgcggatggagccgcaggcggtttccatcatgccgcctatccactggaactgactgatagccaggacccgggtcacaccggcggccatcacggcctcataggcgtcatccgcgggcttgacgtagatgcccagcagctggggctggaagagccgcagcagcacgcacatcaccagacccaggcccaccgtcagtcccatgcagatccaaaagacctggaccgcctgccgaggccgtttggcccccaggctctggctggtgaaggtgatagtagcctgatagaaggtgttctgggcggtgtggataaagttctccagcccggaggcggcggagttccctgcgatgacggcggagccgaaagagtttacggcagactggatcatcacgttggcgatggagaagatgatgccctggatgccggcggagaggccgatcttcaacatgagcgcggctttgtcggggtagaggcggatcttccgcaggtccagacggcatatggaattgatcgtgcacagccggatgatcaccagaacggcggagagcagctgagagacggaggtggcgatagccacacctgccacacccagatgaaagacaataacgaatagcaggttcagtcccacgttcatcgcaccggaaacgatcatgaagattaggggatacaatgtgtcccccactgcccgcaggatggcactgccgaagttataggctaccagggcggggatgccaagaaagtagatcttcaaataaagagaggagagcggcagcacatccattggagccccggccagctccagcagcggtgtggagaaaagaatccccacgacaccggccatcagccccaggatcacgctgaggacggcggagcagtggaccgtctgggagatggcctcctgatccccggcaccgtagtaccgggcggtgagatagttggtgccgatggatacgccgttgaacagcgtcaccagcaaaaagataatagaggtagtggcccctactgctgccagagaagtgctgccggcatagcggcctaccactacggaatccgccgtgttataggccagctgcaagaggccggtgagcatcagggggattgaaaagcgtaagatggggcggaaaagcggtgactgatccggctgactgtatgtgatttgtttcaaaatgtttcctccctttgggagaagtcccctcagaattgatttatcatctgcaagtattgcagaaagaaaaataaatgtcaagagagaggctgatcttgaaaaaaagcacggaaaactgcacagataaaatttgcgtaaaattttcgataacagtggactgcttttttgaggaaatcggttgaacatggaataaaccaaaaatgtttcagaaatatatttcggaaacggagataaaaaactgggagattcgtaatattgacaggcttttgaggaaaagttataatctttttacaggaaaaaaacagataaaaaacaaaaccaatcacaggatagtactagcaaaaaaatttgtttcagaaataaaatgtgaggaagggctctatgaagatcaccgtccggaaaatcgcggaggaagccggtgtgtcaccggcctccgtctctcgctatattaacggatctgaggacgtcagctctgagattgccagcaaggtggagagcgccctgttctccttgggcggaagtccggtggtccggcggccccgcaagcagatcatcctgatcctgctaacccatctgcggtttgacttctacgggcgcaccttggcggagctgctggagcaggagccgcagagcgaatacaccttcatgctgctgcgctataacccccagtcgccggagacagtgcggaacttcgtgagccggatgcatcccgttggcgtgatctactttgaggaggagatcgacagcggcatcctgcagtatctccaaagctgcggcctgcggacggtgatgtgcggcggcgtggccctggaccaccagtccgaccgagtccatgtaaatgacatcgccgccgcctatgagggtaccaattacctgctggatctgggccaccgggagattctcttcctctcggacgacgagcagaagatcggcgctgggttccagcggatcaccggcagccgcaaggcgatggaggagcggggactggaattcccggagtccctggtactccggggcggcgtcaccttcgaggccggctaccaagccatggccacagccctgcgggagaaaaagcaattcaccgcggcattcgccttcagcgatgagctggcggtgggcgtcatggcggccctgtacgacgcggggctgcgggtgcctgaggatatatcggtcctgggctatgacgacctgaccatcgcaacccggatccgtccggcgctgaccaccatccatcaacccatcgatgtgttcatcgagaaatctctagagttgttccgccagccgccgaagtcgatccactcggagattctgctgcctcactccattgtggagcggcagagctgccgccggctcagcgatccggtgccaaaatctgtttgatccctcggaatggggtgtttaaggaaacgaatcaacaaaaggagaatcggtatgaaaaagaagattacagcattgctcctggcactgacgctgctcctttccgcaacagctctcaccggttgcggcggcagcggcgaaagctccgacggtcccgtcagcctgaccctgtccctgtgggatgaggcccagctgccggtgatccaggaaaatgtggacgcttttaacgctgctcacgagggagagatcaaagtcaacatcgagcagatcccctgggacacctactggaccaagctggatgcctctctggagaccaatgaggccccggatgtgttctggatgaacacctacgtccagaaatatgtggacgccggggttctggagcctctggacagctacattgagggcgagagctttgatatgagcgtctatgccgaagggcgtgtgaacgcctacaatgtgaacggccagcagtacgccctgcccaaggggctggatgctgtggcggtggccctgaacaccgagctgtttgaccgctacggtgtggagctgccccaggagggctggacctgggatgacatgcgggacatcgccacccagctgcgggacgccatcgcggccgccggaggcagcgagtaccccatcgtcatggagctggacgcccagccgtcctggatgaacttcctgtatcagaacggcggcaactacctcagcgatgacggcaagacatgcggcatcgccctgccggagtccaaggacgccatccaacaggtagtggacctgatgaacgatgagcagatggctccctactccgtgctgacggagaccaagggcaccgacctcttcatctccggccaggcggccatcgtcttcatcggctcctggaagtccggcgtgctggaggacagctctctggcggcagacggcaatgtccagctgatccagatgccctccatggctgtggacaacaagaccaacatgggcggtctgggctatgttatgtctgccaactgcgagaacaaggaagccgcctgggagttgatgaagtacatcaccggcgaagaggccatgagccacgaggcggaagagggcatcgacatcccggcgtacctgtccgcacaggaggggtatgtggccaactttaaaaatatcaacgcgcaggtatttatggacgcatccgccaacggctttgcctatccctccaacggcaattttgactggaccaccatcgtggatgacgccatgcaggaggcattcggtcaggtgaagactgtggacgaggctatggatgagggggttgcggaggcacaggccattctggacgaggtctttggctgagcccggcagagacagagacgacccggcgaaaacgtgaccttccgtcttgcggcggccccctccggggccgccgcggacagggggagtccgtgggcccaaaagcgcgctccgattcagaacgcggttttgcgcccagggcctcccgagagacgatacggggaaacaggaggaacgcccatgaaaaatcaggcacggcatttcggcaggctcagacgcgcggagatgtgcactgcgtacatcttcatcctgcccatgtttgcgggactgctgctgttcagtatcattcccttcattcagaatatcctctacagctttcggaagatggggaccttcggggagggaccttcatcggcctgaagaactatcaggacctgctgaaggacgacaccttctggctggcgctgcagaacacggtgttctatgccgtggtgggcgtgccgctggtcatcatcttctccatctttctggcccatcagatcaacaagaagatccggggccgcacgatctaccggactctgctgtttatcccggcaattaccatcccggcagcgatcggtatcttgtggcggtggattctcaactatcagtacggcatcttcaactggatcttggagaagctgggcttttcccggatctcttggctgggtgatgtaaaatatgttcgatgggcaatcatcctggtggtggtctggtccatggtcagctactatgttatcatcatgctggcagctatgcagggcattgacagctcctattatgaggctgcccgtctggacggcgccagcagccgtcaggtgttttttaagatcactctgcccatgctgacccccatgatctttttctccgtcatcatggtgacgatcggcattctgcagatcttcgatttcatctacctgatggtggaccggcagacgctgtcgtacacctacagcatgagtctggtgacgtacttctacgagtgcgccttcaataagagcagcatgcggggatacgggcggccatctccgtggtgctggctgccatcatcatggtgatcaccatgatccagatggtcggcaagaagtactgggtcagatctggcgagtgagcgggggaggcagccatatgaaacagaaaagagaccgcctgaacgacgagagcaggctttcgcgcttcaccactcatgtggtgctgatctttgcgtcgttcctggcctttggccccttcgtctggatgtttctcacatccatcaagacgtacgaggagaccattcagatccccatgaagttcctgccggagattccccaatgggtgaatttcagcatcgtctccgataagctgaattttccccagctgtatctgaacaccattctggtgacgatcatgatgatcgtgggccagatcctgatcgtcacgatctgcgcctatgcctttgaccggctgaatttcccgggcaagaacgtcctctttatggggatgctggcactgatgatggtgcccggtcagatcttcatcatcccccgcttcaagctgatggtgaatctgggcctgaccaacaccctggtgggcctggtgctgccgggactgttcaatatcttcggcgtgttcctgatgcggcagtttttctccactttgccgcgggagctggacgaggcggcccgcatcgacgggtgcagctacttccggacctactggaatgtgctgctgcccctggtgaagccggggctgaccacgctggccatcctgggcatgctgaacacctggaaggacctgatgtggcccctgatcaacaactcccaggcggacaagatgacgctggcagcgggccttgccatgctgatcggcgaacatacgacgtattatgagcaggtcatggccggcggcgtcatcgctgtgctgcctctgatcgtactgtttgtgattttccagcggcagtttgtacagggcattgcccacagcggcatcaaaggctgagacaaactgcgaaaaaagaaagggaagtgagcgtatgttttaccggtacccgatcaatgatgtccacatccacctgttcgaccccaaggacatcgacgagtgcatcgccatggtggatgagtgcggatataccaactggacgttcctggcctgtacggtcatcgacagtcccttcgctctggcccagaatctgctgtgcgccctgatgaagctgaaggagggcggccgctgccaggcgttcggttccttccactacaatggggacgtggtgccggacgcggatgacctgttgcggcagatccagtggttcgaccaagcgggcttcgacggtatcaagatgctggatggcaagcccggcgtgcgccgtcggcaaaatctgcggctggacgcccccaactacgacaaaatgttcgactacgcccagcggacccaattccctatcctgtatcacatcaacgaccccatcgagttctggtatcgggatcggctgccccagtgggcggtggagaagaacttcttctacggcgacggaactttcccccacaagttcgagatcgatgaggagactttcggcttcctgcgcaagcatccgaatctgaacctgtgcatcccgcacttcttcttcatctccgaccagccgggcctgtgctgcgagatgctggaccgctatcccaacctgttctttgacatcactccgggatgggagatgtttgagaactttgccaaggaccgggagtactggcgcagcttcttctcggagtactcccacaagatcctcttcggcacggacaccttctccgaccactggagggagaccgtcacctgcctgcgccgggtgatggagactgacgagcccttcgttgcctttgaggagaactgcgtgggcctggacctgccggagaagaccctgcgggacatctatttcaacaactaccacaagttcatccgccggatggacaagaagatcaacgtggacatggtgctggaatatgccgacaccctgtatgaccgcatccccgcgggagagaaccgccagatgatctccgacaccatcgactatctgaaggcggagatcggcaaattccggtaacggcagaagagaggactattcgtgaaactgtgtgtgatcggcggggccggtgcccgctccgcgtttttgaccaaatctctcgtgaagagcacccgggacatccgggtggaccacattgtcctgcttgacaacgaccagcagaagctgaagacttacggggagatctcccgggagctgtcccgtcggctggacccggacctgacctttgaggtcacctccgacgcccgggccgccctgacgggagtggactacatcatcaccaccatccgggccggcggggacgccgggcggctgtttgatgagcagacctgcctggcccacggcgtactgggacaggagaccacgggtgccggaggcttcgccatggccatccggtccgtgcccaccctggtgtactactgcaccctggcccgggaggtggccaaccccggccatctgattttcaactttaccaatcccagcgggatcatcacccaagccctgcggtccaaagggttcgacaacgtgtacggaatctgcgacgcccccagcggcttcatcaagcagctggaggagattctggagatcccctacggcacgctggatatcgagtgctacggcctgaaccacctgtcctggttccgcaatgccaaagtcaacggccgggacgtgcagcgggagctgctggacaatccccggacctatgagcattcggagatgcggctctttacccgggagatggcccggatcagcggagactgcatgctcaacgagtatctgtacttctactaccggcgggtgaagtctctgtccatgatccagaaggcggatcatccccggggagagatgatctacctcatcaaccgcgagctggaggaacagctggcccgactggagctgccccgggatttcgagcaggcgttcagcctgtatatgaccgcctacggcaagcgggaaaacgcctatttctctgtggagagcggagcctgccgggaaaaggtgtggaatccgcccacggtggaggagttcctcaccgccccggatgagggcggctacgcagcggtggccttgcggttcatccgggccatcaccgatggggagaactgccggatggtgctgtccgttccaaacaacggggccatcgacggtctgcgggacgacgatgtggtggagatcacctgcgatatccgctccgacggcgcccatcccgtccgcattggtgccatcgacgagtttcagcttcagcagatcaagcggctgaagtactttgagcggtgcaccatccaggccatcttggaagatgaccgggatgcggccgtcaaaggcctggccctgcatccgctggtgaacgacttcgagctggcggagacgttgacggatatcttctttgacaaatacgcggaatttatccacatgaacgagacgccttaaagacggatcggagagagtgtatgtacgatttcaagacctttgcacaaatgaatctggacttgatcttccaaggctttgaccggatgccccagcccggggaggaggcctttgcaaagcgattcaccatgcagttggggggaggccccatcgtctgccccatcgtgctggagcaactgggcttccgggtccggctggggacgtttctggggcaggacgatgtgagcaacctgtgccgccgcctgctggaccagcggggcttctccagctacgacgagttcgcccaggacaacccggacccggtggtagtgaccagcgtgttctcttgggaacacgaccggggatttctggcccacaatgagggcgtctatgagagcattttggatccggagaccgtctatggcttcctgcgggacgccaaggtggtgtttgccccggtggggcagccggaggtgacccgccgccttcatgaggagggagtgaaggtagtctacgacagcggctggagcgatgacctgtccattgacggcatcaaggcgttcctgccctatatcgatgtctacacacccaatgacaaggaggcacggaagctggccggcacagatgacctggaggaagctgtccgctttctggcgggctacacgcctcacccggtggtgacgctgggcaagggtggctgcgcatactggcacgacggttccatccgctatgtatcggccatcgatgaattccgggcggtggatactaccggcgccggagacaacttcctcaccggcatcatttacggcttgctgacggaggagcccctggaccgctgtgtgcggctggggaacatcttcgcgggtaagtccaccacggcggtgggctgctttggcgcggcggtgacgccggcactaatccgaaaatatctgtgagggcgggggaggatacggctgtgcgcattcagccggaccgcctggaggagacctttgcgacccaggtggacgacgacagcccctcctacggggaacggcagatggctgaccagccgcctctgcgccctgggcctgatggtggaagaggacgacgcggcggagattttgggccgggcctcctatgcgggcttttcaccggaggcgggcgccagcgccattgcagccaccaatatcgtcctggaccggggccagatccgagaggagattcgcagcggctcccaccagcggtacttccgggcctgccgggccagggggtatgagacctggacggtcaccaccttcggcggtagcgataacagattgccggtagccaatggtatcacgggcatcgtgatgccctccgccatgcactgtcgccgctcctgtcaggggatacacttctgttcaggagatggtcgcagtgacagaaatcacggcggatctggtattgaaccgggactgaagcaaaccggctttccgcaattttgagaggagggagagacatggcactgaagctgattatcgtttctgatttcgtctgtccctactgttactggctggagacacttctggaccggctgggggaacagctggagattatccatgtgccctaccaattgacagaaccgccagcgccccggatagacgtatggaacgatcccgtccgacgagtacgatacgctgagaccctggggcccgtctgtcaggctcaggggtagagatgtgtctgccgccccgggtgattccccggccatacacggacctggctttccagggctggtgctttgctggggaacgggacagaggagagtccttctataaagcggtgtttcaagcctattttgtagatgagcgggatattggagatttgtctgtgctgacggaactggcagagaactgcggtctgtcagggcaggacttccgcgcagccttggtggcagggacttatacagagaccgtccgccggcaatcccgcctgtcccgggatttgctgggtattcacatggtgcctaccattttatcaggaaaaaaacgactggaaggctttgttccgaacttgatagagctgaaggcatggttggatgcggtgcgttgagatgcctgaacgtaagcatcaaatacaaaaaacaggtagacaggtatgagaaaatagtggaggaaaagtcacaggcgaaggggagggggacaagaaggtaaagtgaggatctatcttctgtgtttcaatatccactgtaaattattaaaagcggcgttccattcgatggaacgccggcccatcattctcttccttaaacacctgaatcagttatgaacaaacacccgtataaactcgttgagcgtagtccgttgttcctcttcatacggtttagtgcgggatcctgcaaattgtcttcataacgatatacagtttctttgctcacgtcgagccgttttgccaaagatgcacgcgacatcccgcgatctttccgaagacgacgtaaccttaatccaaaatcaaaaactccatctgccgacatacggtcaccctgtatgcattgtaatcctccagcatagttgttatatgatgtgaagatatgtaaatattagtcaaattaggttgacatttaccggatattataatacaatgctaacaaaaatatatgaacgccagcacctgtacaggctgctcacttaatcactatgcgtatcttcaaatgaaaattcttccagttctggatagtcaaaaaattcagataacgtaagactgaatgcagatgcgatcttgtgaagcgtctttatttttggattgaatgtcttgtgatttatgagattatcaagtgttgagtagctgataccactcatggcagacaactgatatattgtgaagtcacgttgcctacatagctccaaaatccgtttgacaataatttgtgaatattcgtccttcatctctctacctgctatcaatgagtaataccttaaatggtgttttctctatgatagcaataaaaatagcgcgctattcccgtgcacgggaatagcgcgtgatggaatgaacggtatgaattatgttgcttgaatagaaaatagaatgtgttgcatcactcaagagaccaaggattataatagatttgagattgaaaagagtgggggaaacagctatgaaagaaattcgcatactcattggcggaatgggaaatgctgccaggccgatggtcgatcttctgactagcgaacgggagaggatggagaatgtatacgggctccattttcgaattgttggcgcagtggacagtagaggtggagtgattgcaccgaatggaatttccagtgtgacgttatcggaagccaaaaacaggggaactttggcagatatccccggcttgggtattcagggccttacggcattggagatgatcgagcagtgcagcgcggatgtctatttagatggattgccgccatatctgcccactggggagccggggacttctaacatccgaagggctttggaacggggaatgcatgtggtgaccgcaaataaagcgccgcttgcccttcattggaaagaactgttttccttggcggcacaacaggggctccaaattcgctatggaacagcggccagcgcaggactgcctactctggagatgggtaaactgttgggacgttgtggagagctgctggagttcggcgggattttcaacgcgtcttgtatgtacgtttttgatgcgatggggcagggacagtcctttgatatggctgtgcagggggcgaaggcaggcggatttttggagccagatccctccatggatctcgatggatgggatacggccatgaaaacagttatccaggccaatacctattgggaccaggcatatacgcttgcggatgtggcgatccaaggtatctgcggcctgacacaggcagatatgatagacgcgaagtccaggggcgaggtttggtgcatggttggccgggctgtccagaatccggatggcagcctgaaactgactgccggaccggaacggcttccggcagatcatccgctggccagggcacactggagcgataaggtgctttggatgcagaccagaacgcagggagggcaggtgcaccactgcatcggtgcgtcggcttccagcacacccggaaatatgtatttagacttggtgactattgccagggaactttaatgaataccttttcagaaatgcagaaataggtgggggggctttgttcctgtttagaatcggcgctgccgttcttgaatttttttggggaggaaaagaagtatgaagagagtctttgcgctggtcctgacattggctacagctttagggttggccgcctgcaacagtggaggaggtgaatccggggaaaatgtggtgaggattggaatttttgagccggccactggcgacaatggcgccggcggcaagcaggagatgctgggcatgcagtatgccaataaggagacccccactgtggatatcggcggcaccacctataccgtggagctggtttatgcggacaacggctccgaccccgccaaggcgcccactgccgctgcggagttggtgagcaaggatgtatctgtggtattgggttcctacggctccaccgtgtctctggctggcggccccgtctttggcgaggcgggtgtccccgccattggcgtcggatgcaccaatccccagattacggcagggaacgggtattacttccggatctgcttcctggatccgttccagggaacggtgttggcaaatttcgcacaggagaaattctctgcgaaaaaagcttactgcctgggtgagctgggcaacgagtacgaccagggcctgattaattattttgagcaggcatttgacggcaccgtggaaaaggattccttcccgaccaatacatccgacttcaccacatatcttaataaggccgtaaatgaggacgcagatgtgattttctgcccggtttccattacatattctactcagatcgtgaagttggctgcttctctgggaattgaaatccccatcctcggtggcgataccctggacagcaatatggtgctggaagcggccgcaggcagcgacgtgcagctgtacgtgtccaccttctaccaggagggtggctctccagagtttgacgagggctttaaggcctggctgagcgaggattccaccgccatgaccaacaacggcggcaacgataccatcgccgctgtcactgccatgggctatgacgcctactatgtggcgctggaggccctgaaggccgccggctctaccgacaaggccgccgtgaaggccgcgctgcctgacgtgacctacaccggcgtgtccggctccatcgcctttgacgagcagggcgacgccatccgggacaccgcctatatcaagaccgcagacaccgccaacaacgcctggacgctggagacggtccagactgtggaataagcctgccatccggccagcctggcggggtatcccccgccaggcggcttgttcttgcgcgagatgggaccgcctcgaaaggggccgcagcccggcccttttggagacggtccttcccgctcgccaactctgaaagaaaagggggtatccctgtgcaatacggaatttccatcctgctctccggcatctcgctgggcgggcagtacgccctgatcgccatcggatacaccatggtttacggcatcctgcgcctgatcaacttcgcccacggcgacgtgttcatggcggcgggattgatcatggtctatctcagcgcaagcctgcccatcggcgtggcgctgccgctgatgatcctgctgacggtgctgctgggctatgtcatcgaacgggcagcctacaagccgctgcgcagcgcgccccggatgagcgtcatgatctccgccatcggcgtcagctatctgctgcagaatctggccacctatatcaccggcggactgccgcagatgtaccccagcctgcccggcctgtccagtcagatcaccattgccggcacctccaccaaaatggtgacggtgattacgccattcctggtggtggcgctggtagtggtgctgacccagctcatcaaccacaccaagatcggcatggccatgcgggccgcctcccgggattttgagaccgcgcagctgatgggcatcaagatcaacaacatcatcagcttcacctttgtcatcggttccttcctggcggcggtggggtctgcgctgtacttcaccaactatccctccatcgtgccgctgtccggctccctgccgggcctgcgggccttcgtggcggcagtgttcggcggcatcggctccattcccggggccgtggtgggggcattcctcatcggtctcagcgagacggtgatcaagagctccaactggagtgtgttttccgacgcgttcaccttcgcgctgctcatcatcatcctggtggtgaagcccaccggcctgttcggtgagaagtccaccgacaaagtgtaaagggggcgtcacgatgctgcaagaaaaaaagagcaaacggggcgcgtggatcgccctgggctgcgtggcggccctgctggtcctggtgattgtgctggagaacaccatgcagcccaccagtatgctgttcaccgtgctgaagaagggagctgtgtacgcgctggtggcggcctccctgaacctgctgaacggctttacgggcctgttctccctggggcaggcgggcttcatgctgctgggcgcctacacctacgccattctgaccattccctctgccgaccgggagagcgtctactacctctacggcggctcggcagtgaatttctccctgccggagctgttcggcggcggcgccctgggtctgatcctgggtgtgctggcggcgctgatcctggcgggctgtgtggcggcggtgatcgcctggcttatcggcctgccggtgctgcggctgaagagcgactacctggccatcgccaccctgggctttgcggagatcatccgggccatcttccagtgggaccggctgggccctgtcaccaacggcgccaacgcgctgaagagctttcccaccttctccagcttcaacatcgagaacgccaatggggaggtggtgctgcgcctttccacctttgtgcccttcctgctggtggcagtgtgcatcgggatcatggtgttgttgatcaactccacctatggccgggccttcaaggccatccgggaggatgaggtggccgccgaggccatgggcatcaacctggccaagcacaagcggatggccttctgcatcagctccttcttcgccggcgtgggcggcggcctgttcgccatgttcgccaaccaggcccaagccaagaccttcaccacctccatgacctacgagatcctgctgatcgtggtgatcggcggcatcgggtccatctccggcagctgcatcgcctcgttcctgtacgtggcggccagcgagtggtggctgcgattcctggacacagagacgtatatcggcgccttcaaggtgcccttcctgcggaccggcttccggatggtggtgttctccatcatcatcatgatcgtggtgctgttcttccgccgtggcctcatgggggaccgggagctctctgatgtggcccggagcctgcgggcccgcctctccggaaaatcgaaaaagaaggaggcggcgaaatgagtgagaagatccttcgtttggagaatatcaccatgcagttcggcggcgtcatcgccgtgaacaacatgaatctggaggtaggcgagggggagatcgtctccctgatcggccccaacggcgcgggcaagactacggccttcaacgtcatcaccggcgtgtaccagcccaccaacggcgcggtgtggtaccggggggagaagatcgtggaaaactacccccagggcaagatgcgcaagctctacaagggcgagcacgccggggagtacacccacgccctggcccccaccccggacaagatcacccggatgggcatggcccggaccttccagaatatccgtctttggaaggaccagacggtgttcgacaacgtgctgacggccatgcactgccgtgcgacgtgcaacctcctcactgcgaccttccatctgaaccggcaggaggaggcgcggcagcgccagcgggtggaagagctgctggcggaggtgaacctcagcgacgtttccggggagaaggcgaactccctgccctacggcaagcagcggcggctggagatcgcccgggccctggccacggatccgcagctgctgctgctggacgaaccggctgcgggcatgaacccccaggagaccgacgagctgacggccttcatcggggagatccgcacgaagttcggcctgacggtgtttctgatcgagcaccacatggacctggtcatggacatctccgaccggatctatgtgctggacttcggcaagctgattgccgacggcacaccggcggagatccagaacaatcagcgcgtcatcgacgcgtacctgggggtggcggaagatgcttaaaatccaacagctgcgggtgtcctacggcggcatccaggctctccggggcatcgacctggaggtgccggacggcaagatcgtcaccctgatcggcgccaacggcgcgggcaagtccaccaccctgcggaccatctccggcctggtgaaggcggagtccggctccatccagtggaacggggaggagctgctgggcaagcccatcgacaagatcatctccgcgggcatcgccatgagcccggaggggcggcgggtgtttgcggacctgacggtgctggagaacctgaagctgggagcctacctccgcaaggacaaagcggagatcgaaaaggacctgaaatgggtctatgagctgttcccccggctggaggaacggaactggcagtccgccggcaccctctccggcggcgaacagcagatgctggcggtgggccgggccctgatgtcacggccgaagctgatgatgctggatgagccgtccctgggcctggcgccgctggtggtgcaggacatcttctccatcatccgggagatcaaccgccagggcgtgacggtactgctgatcgagcagaacgccaacatggccttgaagatcgcggacctggcctatgtgctggagacggggaacatcaccatgtccggcaccggcgcggagctgctggccaatgagaagatcaaagaggcgtatctcggcaagcacagataaggggatagttgtcagatggcaacgggtgctagcggatgtgatgtgtatgcaatttttctgaattggacaagtaaatccggacagcaaagagccgaggcggagagttttcttcgccttggctctttactgcaaggtgtcatcagtcctgtggctatctgttagtaagacatacaaaaggtttttgggcttgcaggctgcaagcccatccgattcaggatgagggatttgaagcagtgacgctgcgaaagatcgccgacgtgacagcatccttttgtttcctatgtgggtggccgtaaagtatggagacttacatttctatttgatgttactaagatttaatttagaaatataattgccgggtaaagcacgccagccaggcgtgctttattcgttttcaggcctatgttgaaggtatctctggatcttcaagaatttagatgatatcagcagcaccgactttgcttgcatcgcattgaaagccactcttcccggtctggtgcgcgcctctgtatttgcacaagaaagacagtaagcgtcacagcaatgagaacccaggggaccattggcatatagagggaaccatgctctgcctgtttcgcatactgactaaatatttatagagtcaatatcgcaggttctgcatttttcacttatttcagaaagcagaagaatctgtccgattgcgtgagctagaagcccacccaatgcaggccaatattatagaaccggcaagagatatggatttacgcctgcgtaccatcaatagtatacacaacaggattcctatcaggcgcttcacacccagctgggggcccgctctttctaatgaatacaccgaaccgctctccggtcttgccttgctcccgatacagcagaagcgctcgttctatcatctcaaagacctgctccttggtgtagatttcatcaatcacggtaccaaggcgctgacgcttaccccaaataccaccgaccataattttatatcctgcttttgcttctgtcacacaatcaaaattacaggcatccacacacttaccgcagttgttgcaggtatcccaatcgatttgcatgatgccatcctcgtccagatgggcatttttcatggggcagacctctacgacggagcacttcttgcagccattgcagtcatcgggattataggcaggtacccgctggcccataatgccgaaatcattcaaacctggcttaatacagttgtttgggcagccgccgatgccgattttgaacttgtggggaagtttgacatcataccagcccttgtagaatgtttcgtgcagttcacgcgctagttcttgagtgtcgatcaggccatggatacacacagtgcctttgcaggccacgatgggacggacgcgggaacccgtgccgccagtataaagaccggcttgggcgatgaatgtattgaatggttcgatgttgtcgtaggtcagaccttgaacttccagagtcagacgagtcgtgagggcaattttcccattaccgaatttttgagcagcttcctttttccggtagaacacaccaacagaagcttctcaatgcccagggagctgttaatggatcaaatgcgtacagcgggactcggggaacggcttcgtcttttgaatagaatctttgcaaccaaggaatatgaggcttttgccgctgtggcagaagcaatgggttgccctagccattcgcatgaagcggcttcatctgctggacagagatgacttgaaggacccgtatgcgctcgttcgtatcgattgtgatgaagaatgaatatttgagcaaggaggatattggaagatgccgcgatacaatatccgggaggataatcccgtcaaatacactcaggtaaaggcggagcaggaaagacttcgggcaggcgtttcccgatgataaccagctgcgtcattggctggtacgggtgacggtgaatgcctgcaaggatgccctgcggtcgccctggagacggcggatggtgcctctggacgactgccgggagccggtgttcaatacgccggagcaccagaatctctatgcagaggtcatggccctgccggccaagtaccgcttgccgctgtatctctattattatgaagggtacacagcggcggaggtgggggagctgctgggcctggggccctccaccgttcggacccggcttgcccgggccagagagaaactgaaagcacagctgagggaggagtgagccatgcagaacatctatcgggagacatttgagcagatccatgcctccgagcagctgcgaaaggaggtagccaatgtgccgaaacaggagaaggcagcgtttagacaccatatttccaaggcagggctgattgccgcagcgttggcgctggcgctggcgggcacggtcctggcagtggccagtcccaccctctggtggtggtttgagcagaagtgggaggaggagaccggcagctcgatgacggaatcccaatccctggtgatcgacggcctgacccgaaaagtgggggagagcgttaccagcggggacgtgaccgtcactgtggacagtatcaccgtgggcagcagtcagatctgggcattgctggacgtgacgggctgggactttgaccgagatgcccagtattcctttgacaggatgcgtgcggagatcgtccctgaccccagtgggggccagcatggtggggctgggtacggcctggacagtatcgggatcacccgggagggcgcagcccggatgctgctggagttctccgccaccatctccactggtaaccagctgaacagaggagattacgcgctggagatcgatctgaacgacctgatccgccgccgtaccggcggggcagaggatgaggccttgtgtgaaggagagtggtctttctcgattcctttggcggcagagagcctgtctcctaccatcaccatcgacagagttcaagtgctgtcgaatcacatggtctgggatcaggctaccggcaaagatggcggcgccttagagggtacagggggaaaatctcacccggctgttgcaacgctaacgaacctccaaattaccgcaacaggtgcctccttctactgcgacggactgatggaccggctccacgcaaccgtgatcctggccgacgggaccgaagtagagaaccgtggcggcggtggaagcagaatggaggacggcggatggtatgtcagctttgactggccggtgccgctggatgtgacggatatcgttgctatccgctttggcgatgcagaaattccgttgaattaagtgagacttgcaaagagcgccccgccaaaagcaggcggggcgtttttgtcactttcacgtttctatccagtccctctgccgccagacggcaaactcccgccggaccagcagcaagctcaggaggaaggtcagcatgtcggaaatgggggcggccagcagggcaccatccaggccgaaccggccggacagcagaatagccaggggaatcagaaacacgccctgccgggccaggggaatggcaagggagggtaccggccggccgatcccttgaaagaaagaggcggtggccagatgcaggccgtacaggaagaaggcggccatatacagccggaagcagtgctgggcacagtccaggtagagggggctgtcagagacgaacagcatcccgatctgccggggaaacagctggaacacgaggaaccacacccccgaaattaccagggcgatggcggcggccgtgcggaaggtctgccgcacccgaagaaaatgcttcgccccgaagttgtaaccgttgataggctgtacggcggaggagacgcccacaaacatggagtgggcaatctgatagaccttcatcatcattccgtagacagagagagcgatgtcgctgccgtacacgctggccgctccgtgaacccgcagcaggttgttcagggtgatctgtaccagggcagtgaggatctgggtcagcaggctgggaacccccagggccagaatccgcccggtgagcctaatggtggggcgcagcgcctggcgccggagccggactgtgtgcagccggggcaggtaggccagaaacagcaccccggccgccacctggccgatgactgtggcaatgccggcccccaccacgcccatgcccagagggaagatgaagacggggtctagaatcaggttgaggacggcaccggtaatcatgcagcccatgctgtaccgggggtggccgtccgcccgaatgatggcggtgaaggccgggcagatcagctggaagggcaggccccaggcaatggtccggagataggctgcagcctccggccaggcagtgtccgtagcgccgaagagccgggcaatctggggggcgaagcaccagctgacgatggccgcacagagaccgctggcggcaatcagggtggcggcgtgaccgatggtgtcatccgcctcttgctgctggcggcggccgaggcacaggctgatgttggcggcgctgccgtctcccagcagcagggccacggcattcaccagaatgaccaccgggaacgccacgttgatggccgccatggcggtgatccccacgccctggcccacaaagatctggtccacgatgttgtagaggcagttgaccatcagcgtcagggccgtggggatggcgtagcggacgatcagcttttgaaccggctcggtttccagcgggctgcgggactcctgatcggccgtcatacggatccctcctccggcgggcgcaccgcccgccgtgataaaaagtcccagcggcagagcaccgccctgcccactgggtaagcatcaatttttttcagcataacatgggcggcggtaaaagtcaacgcactggacagcggtctgttcacagaatgttttcaaagaagccgccggatgccggcaaccttttggcggccggacctatctatatggatgtacaggcggtgcggacaggcgtgcctgtccgcagtggctccgctgtacaaaatcacaaggaaaaggatggaacatacatgagaggattgctcacaggaatcctggcggcgctgatactgctgacgctggcggcctgcggctctgaaaagacggacgccggcaacgacgggaaggaagaggacagcgcaacggtcaatggtgtggtgaactgtatgggggatttcctggttctgcttactgacgatgggacttatcaggttttcgactttggcgaggatgtggatcaggggcgtcttgaagagggggacagcgtcacagttacctataccggagagcttgggagcgaggatccggtgcctgtggcggtttctgtggagaagacagatgcggtataaggaacgctttccataaagcagcggcccgcaaactgcgggccgctgctttttatcagggcagagagacctgggcaatcaggtcccgcacaacagcactgcctagcagcagaccggctgtggcgggaacccagggattgctggcgggcacactgcggcggccgggggcggcgcctccggctgggcgggagagacgggcttctccgggctgaacaccaccttcagatggtgaatgcctctggtccggagttccttgcgcatcacccgggccagggggcagccataggtcttggagatgtccgttacctggaggagggtgggatccagcttgttgcctgtgcccagggccgcgatcagggggatgttcagcttcagggcagtctctgccagatccagcttgcaggacaccagatcgatggcgtccacgatgtaatcgtaccggcagccctccgggaagaagcagtcccgatgagcggcgtcatagagaccgtggacaggatggagctctgcatccggattgatgtcccgcagacgggcggccaccgcctccgccttgggctgacccagggtggagtggagggcctccagctggcggttcaggttggtgagggcaatggtgtcgctgtccaccagggtcagctcgccgactccggaccgggccaagcattcggcggcgtagctgcccacgccgcccagccccagcagcagcacgtgggcccgagcaagccgggcctgggcctccgggccccacagcatctcgttgcggagaaagggatgttccataacggacctccttgttgcaaacaggtggaaaacgtccggctttgaaatttcaaagccggacgtcttgtgttgtgaatgggaatcaacccacaaagctcatgccgaaggaggactgctccgcagtatagccctcggtcttctcctcgtagaacgtatccacggcgtcattgaccagatctgcggacacctggatctcccagtagggctggtcatagcccacgaagtacatgacgtggtagccggtgctctcgttgtgaatgatgccggtgtcgccggtctggcgggcgggatcgaagcaccagtcgttgaactccgtcaccatctggccctgatagacctgctcatacaggccgccggtggtgttggacccgggatcctgggagtactcattggccagcgcggcaaaggagtcctcggtggcgtcgccggccttccactcgtccaggatgtcctgggccttctgcgcggcctcggcgtccttggcggccacatcgtcctcatagccctcgtcatcctcggagagctcggaggcctccggctggatcaggatgtggcgcacgttcaccgtgttgtattcgttgcgggagcggccgttaaagaccaccacatagtagttgctgctgtcgctgtcctccagcacggcggagtcgccggcctgccgggcatcgtcatacagccattcacccagaacagaggagctgtacgagaagctgtcagaagaggcataggtggcggtggactcatactctgcggctgcatcctccagagaggtgcccgccttgtaggcggcgtagatggcatctgcggtggtcttggcagcggccatggcctccgccttcatctcgtcggtgacctcgatggagttgccctcttcatctgtatcagctgcggcgccgttgacgcggacatacgcacagtccaccagatcgtaggcggtccggtcctcctgataggcggcctccagctcgtcggtggagtaggtcagactgtcctgataggactggagataggcggtggccagcaggctgcgccgggtctgctcctcatagatgctgcgggtcatggtgctgccgtagatgagacccagatactgcttttccgtatagccgtacgtgctggcagcggaggcaagggactccatggtgtcgtccaggtcggcctgcatctcgtcgttccaggtgaagccctcggcctctgcagcggcattcatggcctggacgccggccaactgctccagggccttgtccgcgaagtagtcgtaccaagtctcgccctcggtggcgtcggtgacgaacatgacggcgctggaggagatggtctggtccttcaaggacgtgccggtgtccagcccgatcatgctcagaatgctgtaattgccgttgacaaagttctgatagtagttctcaaaatagaagttgacctcagcggcggtgtacttctcaccgttgacggtggccgccgtagccgtcttgggaatgatgttggacttccagatgacggcggcaatggcgattaccaggaataccactccgatggtgccatacagaaggttggtgctgtgctccttctggcgttgcttggcctcccgggcggtcttgggatcgttccagccggagccggacaggtcctggcgggtctttttttctcttgatgcgctcatgtgtgtttcagtcctctcaagtattcaggtgcaaggtttgcaagaaaccggaaattacgcactttgatattatactggatatggccggattctgcaagagaaatttgcggaatccccgccgcgatccggcaggatcggcaaaaacaggggattttttggctgatccgcaaaaaaaagcggagcggccagaccgccccttcagaaaacgtgccccgcgagagccgtgtaggcccgttataacctgcaccttcacggccaggtgggttgcctccaacgcgctttaccacttccaacttccagccgcagacagcagccgggaggcctgcgaaccacgcgctgatccggcatcccgtataacgaaatgtgggttaaaaaaagacctatcacaaaccccgcagggcacatattcaccgtatcacatcccggcccgggatgcaagaggaaaccagcggacccggagagaaatttttgtatggagtgtcaggactctccgtcctcgtcgaacagggactccatgaacaggtcatagaccgcgtccagttcctcgtcggaatccagcgtggacagcagatcctccccgtcctcgtggaggaccttcaggatcaccagtccattgtccggatcctcatcctctccctctgtctccgcagggaagaaagcctggtactgctggccgttgtattccagcgcgtccacaaactccagcacgatctcgcggccgtcctcgtctgtgactgtgatgaaagtggggccgtactcatccgccatggggcgtcctccttctgtctgtattctaggggtattgtaactgactttccagaagattgcaagggggtgaacttttggaaatgtgggaaactggggcgctggggatggatttatcctgcccaaaagcagaaaaaccatgcggataagaaactttttttcggtaaaatacgacattttcgatattgacatgggatggtacaatagaacatattatggaggactctgagcctctgcggccgcagacaggcggcgcggcagactgcttttgcagaaaattcaaattcaaaagaaggaggtgctctgcattggaacgcagaagacgggagggatcccatgagatgatcccccgccgggaacccagacagcagaaaagcaccaaacgaacgggacacaaggtcgtcttcatcctggggacggtcctgctggtgggcatctgcacagtggcgatgcttgccgggctttttatgatgtacgtccggaccacactggcccctacgctggaggtcaacgccgacgactacaccatgaatctcagctccatcatctattaccaggacagggacaccggagattgggtggaataccagaccgtctacggcacggaaaaccgcatctgggtggactatgaacagatcccggacgcgctgtggcaggcggccgtagccattgaggaccaccgattctttgagcacaacggcgtggactggacccgaaccgcctccgccacgctgaacttcttcaccggcagccgggccaccttcggcggctccaccctgacgcagcaggtgctgaagaacatgaccggcgacgacggcaacaccatcaaccgcaaggtgcgggagattttccgggccctggagttcgagaagaactacaccaagcaggagatcctggagatgtacctgaacaccatctatctgggacagggctgctacggcgtccagaccgcgtcggagttctacttcggcaaggatgtgtcggagctggatccggcggaatgcgcctgcctcatcgccatcaccaacaacccctccctgtatggtcccatgtccaccatcaccatcacccgggaggacggcagcaccgtcacgccccgggagctgaacaaggagcgccaggagatgatcctgacccggatggccggcggcaatgacgatgtgggcgtcaccgggctcacctatctgacagaggaggaggccgaggccgccaaggcggaggagctgcatttcacggacggcaccacttccgctcaggacattgtcacggaggctaccggcggcgccaatgtcaactcctggttcgtggaccaggtgctgcgggatgtctccgcggatctggcggacctgtacggcatcaccgaaaaagaggccctgaaccggatctacaacagcggctacaacatctacaccacgctggacccgaagattcaggagattgcggagtctgtctacgaggaccgggggagtctgaacaacctcacctccgccagcggacagctgatccactccggcattaccattatcgagccctccaccggcaacatcgtggccatggtgggcgatatgggacccaagtccggaaacctgctgtggaactatgcaacggatatccagcagccgggttcctccatcaagccgctgacggcttatgccccggcgctggatgcgggggcagtctccccggcaaccacctttgacaactacccggtccgcctgctgaatgggaatccatggcccaagaactcgcccaacacctacacgggctggacatccgtgcgcaacggtgtcaaggcatccatcaacaccatcgcggtgcagacactggaaaaggttggggtcacggcggcctaccaattcgccaccgaaaatctggggctgagtctggcaccggaggatatgaacgtcagcccgctggggctgggcggcctgacttacggcctcagcacggtggagatggcggcggcctacgctgctttcgccaacagcggtgtgtacaatgagcccaagacctacgtaaaggttctggccaacgacaactccaccgtggtgctggaaaaggagacggagcagcgggtggccatgaaggagaccaccgcctatctgatgacggacatgctgcgccgggcggtgaatgagtccggcggcaccggcggcggcgctcgattcagcgggatgcacattgcaggaaaaaccggcaccaccaacgacaactatgaccgttatttcacaggctacacgccgtattactgcgcggcggtctgggtgggctacaagaacaacgagcggatcagctactccgtgaacccggcggcctccctgtggcggcaggtgatggagaaggtccatgcggatctgccggacaagtccttcaaccgtcccagtagcggcctgacaacggtcagtgtctgcgcggacagcggcatgctggcgacggatgcctgccgcgccgattccagaggggaccggacggtatcctatgaggtggctgtgggcacggagcccacgacggagtgcacgctccacaagatggtggacatctgcaccgagggtaactgcttggccggtgagttctgcccggcggagtccatcgtgcagaagggctatctggactatgtgcgggaggattacggcgagagcatcactgcctccgacgacgcctatctcatcagcaccctggaaaaggcggtggcccccacggagaccagccccggcggatgtcccgtccacacgtcggctgcagttacggaccccgatgacccgaatggggggctggatcccagcgatcccaactggcagccgcctgatcccaacgaccctgatgtgcccatagatccggatacgccgacagaggacccctccggcggcggagaccagcctacggagccggatcccaacgatcccagcggcggctttggagacgccggcggcgattggtggagcggtttctggggagacaacacaggaacatgagaaagcggcccggcgattgccgggccgcttcactgtgtccagtgggaagttacaggttcttctcgtaggactcgatcatcttcttgaccatctggccgccgacggagccggcctcacgagaggacaggtcaccgttgtagccttccttcaggttgacgcccacctcggcggcagcctccatcttgaacttatccatagccgcacgggcctcgggaacgttgatcttattgctattcttgctagacataattgaatctccttttcatcatacatttgttgcgtgtgggttactgggtatcgcgagcatagtttgactccgggacgggagaatatgcggtttttctggcggaaaaatttgttggcagggacgtcttggagaaaaatgtcatagatttgttacccatcggaaaggcggattatgatataatctcaaaaaacaaagggaggcactggcgatggagggcatctgcgggcgaatgtgcgacgcatgtacctggaaagagcagctggactgtcccggctgtcaggatgggccggggcgccggttttccggcggctgtcccattgcggactgctgccgggagaaggggcatacggcatgtgtgacctgcaccttttctaccggctgtgccctgcggcgaagagatatgccccagaaccggctgtgggccgtggaggcagagcgggagcgccgggcgcggctggaccggaatgcccctgtgctggccaagtggctgtggctgctgttctggctggtgactcccagtgttttcagcaacattctgaccatggatactgtggcgggagcgtttccaactgccggagtcgttggaaatgtgctggcatttctgatttccctggcctatggtgtccttttgtggcagctgcgggaggcggcaggccggtaccgcacggcggccctgtgctatttggctggcggcatcatcagcggtgtgctgctgcttccggcaattccggaggggaactggctgtggtggctgctctccctgccggtcatggtgctggagctctgtgccgcatatcaggagttttatgcccatgcagaggttttggaggagcttgacccggagctggcggggaagtggcggctgctttggaaatggtggatcggcctgctgctggggttgtttggatgcatcttcctggcattgatttcggcaattctgggtcttctggcgatactggcggacgccatcggcctgttggtggtggggatcgtgaagctggtctatctctaccggacagcaaagcggttccgggaatatcagccggcggcactgcagaaggaggttctatgagattattgttcagacagcggctgttctcctggtttgacagctatgacatctacgacgaggcggggaacaccgtctacactgtggagggaaagctggcctggggacactgcctccacattttgaatgcggcgggagaccacatcggcactgtgcgggagcaggtgctgacctttctgcccaaatttgaattgtacgtccaggatcagtatgtgggctgcatccaaaaggaattcacatttttcacgccgaaatttgacatcgactgcaacggctggcgtgtggagggcgacttcctggagtgggattaccgggtgacggaggcctgcggggcgcaggtggcgtccatccacaaggagctgctccactggacggacacttacgtgatcgacgtggcggacccgggcagcgcgctgtgcgtactgatgctggtgctagccatcgacgcggagaagtgctcccggaactgagcgccgcccaagaatgaatgtaaagcacgccgccctttcgggcggcgtgctttacagactgcggatttggttttggatgagggaacccaccgtgtcggcgaactggtccagggaacggatgcgggcgaagttccggccatagacggtgtgggcggcgggcaggtcgtcgtcattcccggtgaaaacgcacatgacgttgatgcccttgtaggtcagggaccggatctccatggcggtgttctggatgccgttgtccgcggcgtattccacaaagcttccgctgtggttcatctggatcacgtcgttgggtttcacgtcggagaggaggattaccagcttgtgttcgctgggggagtcttccagtcccttggccaaggcccggatggccaggccgtcccggttgcagccggtggtgaagtaattgaagatgcggtcgtttttgcccgtctcatagtagtcccgatagcgggtcaccacggtgtatccgctgagggagcagaaggaggatactcgcaccggaatgtggcagcgggtaaggctttcggcaatcatatagccttgggcggccaccaccgcctgccggtcgatctgggagctggaggcatccagaagaatgtccaccgacaggtcgccgggatccgactggagaatacgggtgaacaccttgtcgtcgtccaggtacacgccccgccagatgcggccggcatccagcgcgccggaggcggcacggacaggggtgggctggagataagccagcatggcgttgcggatgcgggcggtgaggcggcggatgctggtgcggtggcgggtggcgtcggcttcgtaggcggcccggttcagctccatctgtcgcagggcgttgcgccgctgggcggccacatagcccttgagcttttcatgagtgtcgtctccggtggcgtagtacaggtggcagccctggtgctcgtccacgcagagctcccgctccaggctctccagctgcgactggtcgtataagggggcgccgaagtagccccgcatgtattttcgcagggcggcctccgtctgggccaggttgtagtccgtcaggcggcgctggaccggctctgcgttggctccgccgccctggcccttcaccagatgctccccgaacccgtggccaaaggcccgcacggcgggcagcaggtccgcctcggaccggcggcggaaggcgaagagggggcggcgccgtttccgctcctccgactcctgggcctgggtctcgccgggggtgaaatggaaataggtgtggaggaatgccagggcccgctccgcaatggcagggccgtccaggtctccggggaactccagggcatccagcatttcccggtccctgggcagcaggggcggttcgctctgccccagggccctgcagaagtgggcgttttccagcgtggccagcaggtcgccgggatctgcccgctggtccagagccacggcccggcgggcatagctccgccgcagggagggcagcgccggccggcggggagcctcccgctggtagacggcgttttccagccccagccacagcagctgctcaaagagctgttccttggagcagccgtggagggattcaaacagcccttctatggtctctgctccgtaattcttccgcacggcgccgatgatgctgttccaatacaggtctgcacggccatcctcgtcgtatgccttgaagtctggctcaaaggagtaatccgcagcggcgttccagatcaggttccgggcccgccgcttctcactgtccaggatctccatcagtcaaacacatcctcacggcggagcgtctccggcaggcgggtgcggatcacgtcccgcaccagctgccgctcaaagtcatcaaaggacttgttgacaaggcccagatccagcgcccggttgccctccagcccggtgcgcatcagtcgcacggcggccagcaggccccgcaggtccagaggcttggtagaaagctctccgccgtcgcatttcttctggatgtcctggaacaatccggcgaactgctcggcatacacgcctttcagagaggggaactcccgcttcaggagcttgatgagcccctcggtggtgatggcgggcatgtcgatcaccacgaaccgggaggccagagcctcattcagctcccgggtgccggcgtagccgtagttcatggtggcgatgaagcgggtggcgtcgtgaaggggaatgcgttcatagccaggcatgtcgatggagcggcggaagtccagcgtggcgtggagcaccgccaaagactcgttcttggccatgttgatctcatccaacacgccgaagccgccggtctccgcacactggtagatggggcccttccgcagctgtacggcgccgttttcaaaggtgtccgtgcccagcagggtggcggcgtctgtgttgatgtagaaggacacgttccagctggggcggccgaacacggtggccaggttttccgccagcacattcttgccagtggccttggggcctaccagcaacaggttctctccgcagaggatggcggtgatggcctcctcccagatgtcctttccataatagagataccggggatcggggacccggcgccgcagggtctcgtcctcctccggataggcgtcccgaaatttttcgatctccgcagtgatgtcggcgctgacgccttcatcccgcagaaattccagcatatccaacatagtgtgaacctcccgtgttttctgactctatcatagcatgattcctgaaaatggcaagagaaaaaggcgcgcccgacattcaccgggcgcgctgaaaggatcaatctgtattctccaggggaaaagtcacttgccagaggccctccgtcagggtggcggcggtatagaagttgccgtggagggtgcatcctgccagctcctccggcgggacggcaaagagaaagtccatataatccgtccggccgccagccgtctcacctgtaaaataagagataccggtacaatggaattccctgccgtcggcatcttccatccacaaaaacgcgtggttgtccgtcctggaggcgtctccccggcacagctggatgtggaagaggccgtctgcgtaaccggcggctgtgatgggcaggccctccgcgggctccgccaggacttcaccgggttgcagcattacggaagccagatcgccgcttccaccggtggcagagtaataggtcacctccggctccctcacccctgcggcagggggatcagccccccaggtgagggcggtctccgcctcttgggcatagttcgtcagcttcaggtccaccgtcacgccctccatcgccttcttgcctgtcagcagctgccggacggagaaggtcatcttgccgccggtgggaatgggggagccgtccatggttttcacagtgcagagaaaagtgactgtcccggtggcctcgtcccaggccacccgctcacagcggccggtctggtcaaagggcaggtggaaggaccaactgtcaaacaggtctgtggtggcgtccacaggaccgccggagaggacgatgtacgcctgggcagtgtctccctccacccggacggccgctacctccatggtgatgccgctgtccgtgcaggcttcctgtatcggctggaagaactgggctacggcgggggcaatccggtataaaaccgcatatcccgtctccgaccggaccgccagggctggggtagccagcagcactgccgccacggcagcggccgccgccagccggcgcagggggaggcggtgtcggtcagggtgggagagagtcttgcggatcaggtccggcgacgggccgacaggctcgttcatccggcggtaggttttggaaaagttcatatatcctccttcagcaatgtccgcagcttctgccgggcccgggtcagctgtgcccggacggtggagggagaccggcccagaatccgggcgatctcctccgtctgatagccctcatagtagaacaggtggatgacggcccggtatttgccggggagatgggccagagcctcgtccacagcggattccacggagtcttggtaggaatagacatcctccagcgggagggtccgcatccgccagggggaggccagcaggctccttgcgcagttggccgtcacccgtaggagccacgcacgtcggtgttcctcattcgcaaaatccggagcggaccggtggagccggagaaaaacctcctgaaacacgtcgtcggcgtcgctgcgggagcgggtcatggcgtaggccagccggtagactgcggagccgtattgcgccacggcttcggcggtatcgggcatgtgatcacatccttctgtaaggaatacccggcagagggcggaattgctgcaaagagaaaaaacattacatttgttttggcgggaatgttgcgtttggttgcggcggtgtcaggtggctgtggtggactttcccggcggcgcttggtatgatgggaccagcgaaagagactggaggaggaagactcatgacctttggagagaagctgaccgggctgcggaagcgggaggggctgagccaggaggccctggcggaacagctgggcgtctcccgtcaggcggtgagccgctgggaacagggggcggccctgccggacgcggcgaaactgctgccctgcgcccggctgttcagcgtggacgtggaatggctgctggatgaggaacaggatggggaggatcggctttcggcggcggagttcctgcagggaacggaaaggccctctgttcacagagactggccctggtatatcgccggcggcatcgtcaccggcgcgggttctttgggtatggtgaccatggggattctgagcgccgtctttcctgtcgtggtttccgaggctccggcgggggtggagtgggtccgcatctacaccggcctggctggttttctgaaagctcacggcgtagagtggctctttgccctttgggcggcggtggccctggcggggctctggctgctggcccagccgcctatccggcgacgggaacagacggcctcccagttttcctcctggtacgccgcgggcgtggcggtagggctgtacggcgtcggtcagaccgcctggtatgtccagctgggcaagctgagagacctgcctgtgctggcccttttcctggcggcggcggtctggtgcacggtgcggcagttttggcggctgggcggggagccggacgagacccgcaggcggcaggaacggatcattgccctgctatacaccgtcgcacagggagtccttctcctgctgacggcggaggcgggctttggcctggtggcgctggtgctccatattggggtgtatttcatctgcgctgcagccataacctggaggcggtccggcaggggaaagcactaaacacaaaaacaggaggccggtctcccggcctcctgcctttgtgtctgttcggttatcccatcagataggcgtacttggtcagcaccgtccagatgaacacctcgatgtcggcgggcaggtcgttcttggcgtccagatctgcctcgaacaccttgctgtccaggcgcaccagcaccttcttcccgcccagaggcaggaagccctgattgtttacactctcgtcaaagccctcccgggtcaggaacagggtgaacttctcccggtagggggcggagtcgtaggggcagaacacggcgcagttgccgcactcgttgcacatccggtccacatggaggatctgctggcggccgtccggcagctcgatgaccacattggcccggttggggcacacgtcggcgcagacctggcacaccacgttgcaggtcaggcaccggttgccctcgcacttggcgctctcgcagaggacgcccttcttggcgacggcctcctcccgggtggctacggccttggcggggatggcaaacttgtgggcctcgccgatgacggcattggcgaaatactgggcgtcggcaatgccctccaccacggtggcgggcccgcgcatggcgtcgccgccggcgtagacgccctcgagattggtcttgaaggcggggatgcccttctcgtccacggtgatgccgttccgggtgaaaacctcgctctcaaccttctcgcccacggcggagaccacggtgtcgcaggggatctccaccatttcgccggtggggacgggcttgcggcggcccttgtcgtccgggtcgcccagcttcatcttctcacaaatcagcttgccgtccttctgctccacaggggctaccagctccaggaactccacgccgtcggcaatggccatctccagctcctccgcatcggcgggcatatacttcttcgtccggcggtacaccagggtagaggatttggccccggcccgcagagcggcccgggcggcgtccatggcggtgttgccgccgcccaccacggccacatggcccagggagacgtccttacccgccttcatgtcgcgcagccagccgatgaccggcaccacgttgccggggatgtccagccgtccggccttccaggcgcctacggcgaagaagatgtgggtatagccctgtgccttcagctctgccacagagggggcctcggtgttcagctttacctccacgcccatcttctccatcagagccacgtccttgtcgatagcctcgtcgctgatgcggaaggcggggatcacctgccggacgatgccgcccaggcggtccgctttttcaaacagcgtcacggggatgcccgcccggcccacgaagtacgccgcggacatgccggtgggaccgccgccgatgacggccaccttccggccgtccgtcaccggcgcgggaggcgtgatcttggacatgtaggcgtcatagcccttttcggccgccaccagcttggtggcgcggatgttcacgggctcgtcgtaataattccgcatacacttggtcatgcagttgtgggcgcagatggtgcccgtgatgaaaggcagggggttcttctcggtgatgagccgcagggcggaggcgtacgcgcccttccggcacagctcgatatactccggaatgtcctggtggatggggcagccgcccttgcagggagcggtgaagcagtccagcaggggcaccttgtcatacagcttgcggcggggcaggggcttgatggctttcacatggtacttgtcggaccgggccgccagagagagggcctcgatgccgaccacgtccacgccggtgaagggcttgaagtccagagcgtccagcttgtctccgatctgggtgaaccgctggtagccgccgggcttcagctcggtggtggccatggtgatgggccagataccgcaggcgaacagcttgtcgatgttgaaggcgtcggcaccgccggcataagagaggcgcagcttcccgccaaactccttggccatcatggcggccatggtggtggtcagggggaagagggacttgcccgccatgtacatctcctcgctgggcagttccccggccttcacgtccacagggaaggtgttggagagcttcaggccgaattccagcccctccttgtctgccagggcctggaggcggtggaacatgggcaccgcgtcggcgtactgcaggtcctccttgaagtggtgatcgtcgaaggcgatatagtcatagcccatggagtccagaatggaccgggcggtctcgtaccccaggatggtgggattgcacttgacgaaggtgtgcaggtgcttcttctccagcaggtagctggcgatccgctcgatctcgtccggcgggcagccgtggagggtggacaccgtcacggatccggacacatggggagtgatcgtgtcgatataatcgctttctcccgggaagaactccttcaaaacagcgatgcactcctggaagatgggcgtcttggaggcgtccaccatgccgttcaggaaggtgtcgatcttctcaccctggatgcctgccaggtcatagcccacggacatgttgaacacgaatccgttgggatcgcccagaccatagacctttgccatgatcttcagggcgcaccaggccttcacatactcctcaaaggcctgctggacatacagctccgtggaccactcgcagttgtagcactcatcctccgccaggatgcaggggcggttgatgcaggcggccagatccgcgccgtccatcttctggacggtcttcagctcgaagaaccgggcgccggcgaaatagccggcaatgatgttctgggccagctgggtgttggggccggcggcggggccgaacggagtctcgatggtctccccgaagatggggagcttcttcatgccggccttgtagggcttgtggacgccgaacacggcgccgtcccggcggtattcggtggtgatccaggtcatcaattcccgaaagggaatgggggtcattaactcagacatagtttttcctcctcagaataactcctgaaatacgaatgcgcactgcttccgcaggggcacatcggccggtcatcaatactccttgtggttcagccggccccacagacgcttgctgctctccagaatgtgggcattcacggcctcctcgtcgatctccgtcaggacccggtccttcatcaggattctgccgttaatcatggtggtctggcactgccgccccgtcatgccgaagagcatgtgtccgtcgatgttggcatcagagaacggtgtgaagggcttgtagtccatgacgatcacgtccgccgccgcgccgggcttcagcacgcccagagtggggaagccggtgcgctccgccatcttggcgttgttgcggaacagcatgtccgtcacctcgcaccagcccacgttgggcatacaggcgttgtgccgctgggagcacagggccaccttgatggactccagcatgtcgttggtgtaggcgtcggtacccagaccgatcagaatgcccttcttgtagagctgcagcaccggagagatacccacggcgttgcccatgttgctctccgggttgttgacgcacatggtgtccgtggccttgatgatatccatttccgccgtgttcacatggatgcagtggcccaggatggtcttgggtcccaggatgccgtggtcctggagccgctggacgggccggcggccgtagttctggagggagtcgtacacgtcgttcatgccctcggacacgtggatgtgatagcccacccggccgctgttggccgccgccatccggtcaaaggtcttgtcggagatggtgaacagggcatgtccgccgaacatggccttcagcatatcggaggggttctgctcgcagtagtcgatgaagtccttgttctcctgcacggactgaagggatttctcctccccgtcccggtcgctgacctcatagcacaggcacgcccgcatcccgaattccctcgtcacctcggcgatccgcatcagggagccggggacctcacagaagctggcgtgatggtcgaaaatggtggtgacgccctgcttgatggagtcgatcaccagggcctgggcgctggccttggtggcctccaggtccagattccggtcaatgtaccaccactggccgtccagcacctcatagaagctggtggggttgtacccatcgatggagaggccccgggccagggcggagtagatgtgggtgtgggcattgataaggcccggcatgatgacgccgccacgagcgtccacaaattccgcctgggggtacttggccttcagatccgcggtggtgccgacctccacgatcttgccgccatcggtgaccacgccgccgtccggcaggtagccgatgccctccggatcccgggtgatgaccttgccgtttgccagtaaaatcataaaaatgacctccttttgtccgtcttttgcatatctgataaaaagaaaaggcgcttcaaaccgctgtcggtttgaaacacctaccaaaagaccggaatgataggtgtcagcccgtgcgcgcagcacttcgttgcagctatcattcttcccttgtacttgtattttaccggacagcagcctaaaatgcaagcagggaagctcaaaaattttcagatggattttgtgtagtttgccggaaagcggcggaacttattcccaaccgggtccgtctacatgaaatgaaataaagaaagcgatggaatcagagaaagaggaggcgtcagaatgaaacggctttggatttgcctgctggcttttgcgctgctgacgggatgcggcgattccggcgacattgcggtgacaacggtatacgaaacagatgacccgccccggaccgccctgaccacggagtgggagacttacgacccgtcggtggagacggtgtggtgcatcctgtcctatgagggggaaggggaatctctggagtatggggcgccctattggctggatgtgcgggaggcggacggcagctggacccaggtgcccctggctgagaacgccggatgggatgccatgctgtataccctgccgtccggtgaaaagcaggcgtttccgtgcatcctgtccctgtttgactacgacttctccggcggcagtacgttccgcgtcatcaaagagatcggagaatatacggccgcggcggagttcaccctgacaaagggggcggtcatctccgcagagacgccttacggcttcggccccatggaggaggtgccggagtacggcgacccggcggagctctccgccggcggtgccgtggtgtttaccgaggcgggaacggagaatgcggatgcggcggagatatttttggagaaggtctccctgggcatcccctgccagctgcggacccttcagaactactatgagagctggcccatgctgatcgacgtcatctatgacggccgcggctttctctggcggatgcggaccggcggagagatcacggagaaacgattttcctacatcgtgacggacggcacggacgtatacctctccaacggcgcagactgggagagcacagaacagtacgacagtgagaaggcgtttctgctgccctccggctccggatccttcctggtacccgcggcggaggcgatgacagatgaccggctggcggaaaataccgcccgctatcggatctggtcaggcgacgggatgcgggctgcttccctgacggaggaccctgcagaattcagcgtcatacgctgtgacccggagagcggaacatggagcaggtcctggaccatccgggagctggatgaccgggccacggcagtgagggacctttcctggctggaatccggagcactcctgcacatcacttatgaaacggagaaggacggcacgctgacggttgactttgtgccggacgctgaactgactgatcccggcgatctctgcggctatccggcggaatagagactgcggggccggcggtttgccggtttttccgtagaatactgcaaaatcttgggattttccattgacaagggcacaaaagctctgatattctattcgggctgattgaaacgatttcccgaccattccccaacattaaaaaggagagagatgcacacatgctgggagagatcattgcggatttgagcaactggatgtatacctacctgctggtgattctgctggtggccgccggactgtttttcaccattcggaaccggttcccgcagctgcggctgctgcgggaggccatccgcgtggtggtggagcggccggagaaggagggaagcgtgtcctccttccaggcgctgatggtgtccaccgcctcccgggtaggtacgggcaacattatcggcgtgtccgtggccatctgcatgggcggctacggcgccgtgttctggatgtggctcatcgccctgctgggcggcgccacggcctttaccgaatccacgctggcgcagatttacaagcgccggaacccggagaccggcgagagttacggcggccctgcctattatattgaggcggccctccacagccgtcccctggcggtgctgtttgccctgagcctcatcgccacctacgccggcggcttcaacatgctctgctcctacaacctccagtccaccttctccggatacagcttttattccccggagtggacgccctggatcatcggcggcatcgtggcgctgctgaccgggtactgcgtcatgggcggcggcaagcggatcatcgccttcgcctccactctggtgcccatcatgggcggactgtacgtgctggtggccctggtggtcatcgtcatgaacgtggggctgattccccaggtgttcggacggatcttctccgaggcgttcgatttccaagccatcttcgccggcttcaccggctctgccgtgatgcagggcgtgaagcggggcctcttttccaacgaggccggcgtgggctccgccccaacgctgccgcctctgccaatgtcagccatccggtgaagcaggggctggtccagatgctgtctgtcttcctggacacgctggtgatctgctccgccaccgccttcatgctgctgtgctccggtgtggagcccgcagtggagctgcagggcgccccctatgtgcagtcggccctggccgcctccttcggcaccctgggtcccgttttcatcaccgtggccatggtgctctttgccttcacaactctgatcggaaacctctactatgtggacaatgccctggcgtatctgctggggcacgtgccctccaagcggttcatggtggtgttccgcctgattgccatgggactgattttcctgggcgccggcctcacgctggatctggtgtggaacctgtctgacgtgctgatgggcgtcatggtgctcatcaacattccggtgatcgcggtcctctcccgtccggcggcggcagccctgcggaactataccgagcagcgcagggccggcaagaaccccgtgttccgggccgcggacatcgacctgaaggaaaagaccgaatactggaactgaaataaaaacggcagggctttgaaagcggacgcttcggcgtccgctttttttgcatagaatggaatagaaacagaaaatttacaaaaactacttgaaataaaaaacgaaatcgcttaatataatatcgaaaactatattatatgatgcggacggcatgatgccggatttcaagaaggagagaccattccatgcgcaaactgtttgcaaaggcccaggaccccatcagctgtgaaacccatgcgctcggcgcggtggccgccctggggggcggtctgctgtatctgcttcggggcgtctggacggatgcggccataccggcggtggcggcggccctgtgcttctgtctgtctatggcggcactgtatgccgccagcgccatctatcactactatcccggcactgccgccagcggcggagtgaagcgggtgctgcggaaaatggaccacagtatgatctatgtgctgattgccggcagctacacgcccttctgcgtggtgctgctgccccagcccaggggaacacaattctgcctgatcctctggggcgtggccctggcgggggtgctggcgaagatgctgtggatcaacgcaccacggatgctgtccacggcagtatatctcatcatgggatggtctgtggtgtttgtggcaaaggacttcaccgctctgggccagccctgcctgacgctggtggctctgggcgggatctgctactcggtgggagcggtgttctacgccgtcaagaagccaaacatctctgcagagtggaccttccacgaactgttccacctgttgattctggcggggtctttcttccactatctggcggtatatctgtatgtgctgtgacgcagtggcgaaaaatctgactgaaaacgaaagcagcccggcggaatatccgccgggctgcttttggaatctgtgcaattggaacactggcgctgtttattgcgggctttcatccggtatcggaaggccgtgcgactccatcaagccgtacgactccagcagagcttttgcctcgtccagagatgctgccggagcgacatagacggaggagccggctacgtaggttgacgttccgtcgtcctcgccggggacccgctcaaaggggaacaggaagaactgcgtatattcccggtctgtgtacagttccccgaaaaacgtgtgggcggggaactttccgtattcgagcaggccccggttgaggccgccgccctcatgggccatggtcagccagaccttgctggcttcctcagaggtgaagggctgttcctccagttccagatagccgctgaagctgtcatcctgcccccactgcttcaccatctccccgtggaaatgcagagtggtgttcacggccgtggcctcgccatcctcccacaggaccgccgggagtgtcacgtccacctgtgaccggaatttcaccatgcgggcaatgaccagtgcggcagcgagaatcagtaccagacagatcaccgtcgtggcccggttggggccgtgccgtttggcgttcgtctgctctggggccatggtatgctcctttccgccggacgggaccggcctgccgtgcatcacacacgtaaagggagagcgccttattttgtcccgaagatccggtcaccggcatcgcccagaccggggacaatatagccgtgctcgttcagatggtcatccacggcgccgcagtagatgtccacgtccgggtgggccttctggatgcgctccacaccctccggcgcggccagcagaaccatcagcttgatgtttttgcagccccgcttcttcatctcggtgatggcggcctcggcgctgccgccggtggccagcatgggatccacgatcatgatgtcccgctccgcaatgtccttgggcatcttgcagaagtagacatggggctccagcgtctcctcatcccggaacatgccgatgtggcccacacgggcggagggcaccatccgcagcacaccgtccaccagccccaggcccgcccggaggatgggcaccacagcgaacttcttgcctttcagggtgggggcgatggtcctgcagatgggggtctccacctccttggtggtcaggggcagatcccgggtggcctcataggtgatcagcatcccgatctcggagacgatctcccggaaatccttgacgctggtgtccttgtcccgtaggatggtcagcttgtgggccaccagggggtggtccatcacatgcactttgccgctcatacttataaactccttttctctgatatccttgatgtaaaccgttccctacgatctaaaccgttccctcagatctggggcggctgccgcagacgctgggcctggggagggcggagatagaccggaagcaattcctgggcggagaccagctttcccgcccgggccaggtcctcggcgcacagggccacggacatggcgttctgcatcaccagttggggcggtgccaggcggcagggcagtcccgactctgtcagcgccttctcacagaggacggcgccgtcccccacgatcaccaggggcagtggctcgctccgcagctcctccgccagctccgcaaggccgatggcgcgatccggcgtccggcgggtcaggcggccatgttcggaggtgaagagggcgttgtagatctggctacgccgggcgtccatggcgcagaccaccagggcgtccatgtgggccacgttccgggccatggcctccagggtggagacggccgcgcagggcttgtccgcggcaaaggccagtcccttggcagccgagacgccgatgcggatgccggtgaaggaccccgggcctgccgccacagcgacggcgtcgcagtcctgaacggtcaggccggtgtttttcagcatggcctccacaatgggcatcagggtgcggctgtgggtgaggccggtgtcctgatagccggagcagaggactttcccatcctccgtcacggcggcggagaccgccttggcggaggtttccagtgccaagatcctcattgtgcagcacctccttccacggtgatgctccgccagccgtcgtgctccggatggcgggtgagggtcacatagaccgtgccctccggcagggcgtccgccacctgctcgctccactccacggcgcagacgccgccccgggagagatagtcctcccagccgatgtcgaacaggtcctcagacccgttcagccggtacatatcgaagtggaacagaggggtagggccctcatattcgttgacgatagtgaaggtggggctggtgacccgacctcggcatcccaggccacgggcaaggccacgggtaaaggcggtcttgcccatgcccagaccgccccggtaggccaccacggcgccgggagagagagcggcggccaaccgttcaccaaaggcctccgtctccgcctcgctgtgggaaatatactccacgaagcagcgctcctttccagtgatatttccaaatccgattcagtataccatattttgaacagtctgtaaaatagaaactataaaaatcaatggttctgtgttgttgctgtgaattagctgtgaaattagagaggccagggcaaaaaagccccggcttttctttgtttgaaaggcatgaaaacccgccccaggaagccccggggcgggcaacggtttatcctacaatcaggtcatcaggtgcaatctcaagataccgctccaaaaactcaatatcggagcagggcgcaagctcgttatgcacggcctcgcgggcgtcgtcatccatgtactcagccatagtgtcaaggctgatttcctccagcgcctcggcggccgtggtgtaggttgcgccgttgttaatgctgatctgtttcatggcttttgatcctttctcccgctatgcgggctccgttaaatttgattgtagcatccatccgagggagcgtcaatgctcccatatgttgttcctcctgtttgatttgtcgtggttgctgttcgctataaaagaaaggcggcaccggataccggcaccgccttatgtaatcaggttattcacttcaccttcgggagcggaaacttgatgacatttccgcactcttccgcccaatcaagcaagctgttaacgcctgcccttgtgacctctgcatgttcttccagcttttccaatctgtcgttgattttccgaagttcctcttgctgggcctcaagcagctgcaggatcttttcctcattgttcactctgcatcacctcatgctgccattatacggtgccgatattcggttgtcaaggtgccgccgcccgctgcggtgttccgctttggatggtttaatcatagcatcatgtacatgatattacaagatggcaaactccacaatcatgaacatgataatttgtgtatttttatcatggacatgatttttgggaattcgtataatatagaataagaaagtgggtgaaattgtggaagaaaagaaagttgattggagaaataagtggcaggctgaaaaccaagaaagaatcatacttatgacgccaaaagacccgcggaagggcccgacaaaagctcagatcaaggaggcggccagaattgctggaatgtctgttaattcttggcttttagagttggtgagtaaggagctgtttggatgagggaacgcaaagcaagacaatacaacgagttcggggaactggtttatcaggttgggacacagggcggaggctccatggcggaggatgtttccggcgtcagaatgccgtcaaacaaggcagaggcagaatgtttcaaacttttgcaggacaatgggtggacgccaaccaaacgaggatggccggacttcttctgcgtcaaaggggatcaggtgtgcgctgtagaggtgaaaccaagcaaaaattgcacactgaaacagaaccagcttgttatcatgggcgcactttctgcaaagggcattcgttgttttctctggtctcctgatggtggctttgaagaagtcatgggcatgacgaagccagcagagcagccgttttaattatctttactgtatctatacagaaataccaggtacttcttgtacctggtattttaattattatattattatattattatataactccccgtaggggagtttaattattatctctgtattttatctgatctgtactgtatctgtattgattattaaatcaggtggttttcatgggcagacaatgaggcaataagaagagcaaggggattttgtacaagaaagagccgtttggaaatacttaaaaaaattgaattaaattgatagaaaaataacaaggacgcaattcggaaaactgggaattaactatttgtttaaatgcaaatctagtgtttgcaatggttttgtggttttctgtgtaatttttgtgtcggttggccgccctggctgcgtgtgcatcatggctccgacccgcggcctgcgtgggcgtggctggcctgggggcatgcggccggggctgtagatgatggataacaaggggggaggggtagcggaaaaacgggcggcctcgctgggaacggcataggttatatttcctacatcccctcaactctctacaggtcagggggataccggaaaaacgggtgggatatgttctgaaatccggccttaaaatactattatcgggtacaaaacaggggtgcataaaatatgctgaacgatttggaagcgatctgtggtagagtatagataggcgaaagcctaccatcttcttttctcacctgcggcgggcagggtgttcctccagccctgccctgaccgcggggcttataatggggactagaaactgggggaccgcaccagagtttcgcaatcgaagccgatatgcggtgcggttgccctaccgcttgtgttgacggctgcgttcctacgtggagagagcagcggtggggcgattttgatacaaggcggtgaggacatgccgagagcgaaaaaagcggctggggagccggaagcggagaagcggacgggagcgggggcaaaatatgcaactgcggaggaactgcaggaaaagctggacgcttactttgcagagtgtgaggagcgcggcgatgtccccgaggaattttctcttggcgtgtacttgggtgtttcactcatgacgctggataactggtacaatggccgccgctgcgaatacctgcaggagacaatccagatggcctacatgcggatgtccgccgctgctgttcagatggcgtaccggaatccgaaagccccgatgccgatctttgcgctgaaacagaagcggtacggcggatatcaggacaaggtggaagccaatgcagaagtgaaagtcagtgtccagatgggaaagaacatggaggcgagtgatttcgcatgatggagtatttggcgtgtttcctgtttggtgctgtggttgccctgaccggggtaaaggtcggctccttcacaaatggaggggagcggcaggaagcggcggcgaagaagaatccggacccgcaggcagaagatgacagggacgagcagcgccggtccaaggagatcgacgagggcatccaaaacctgatgacattttcagtcaatggcaaagatggctttgatgtaggaggtctgtaatggcatctgtgcaggatgtttttgatatggcgatccatttgatggatgcgcagaacgagtccacaggcgcgacccgtacaacagatacgaacgaatatgcgcttcggacgccaaacatcctgaacacgctgctggatcaggtctatccttacagtgacacgtatccggacctgtcggatgggacgaaaacccgaccatctctggtcagtgtgacgtctctggatgactacctggacctcgatgactacatctgccggaacgttctgtcctatgggttggccggattgctgctgacggaagagaaccccacacaggcgaacttcttctggcagacatacctggagaatctgaacacggccaaaagccgtctgccatcctccggcatcgagagcgtggaggatgtgtacggcggaggcggtggagacaactacctttctcgctggggcggcattgaatacgggtggttcggccaatggtagtacatggatggtacacctgccccaaatgccataagggtatccagaaggtgacgggaaacacggttctgtatgggacgccggtatactgccgcaagtgcaggcgggagtggtggcccacaatcttcatggggcaggagatcaccggaaatttgccggagttcaaaatgaaataacaagctagagcgcaagacgccagagctgggaatgatcccggctttggcgtcttttttgttttttctgagcaagacgcccgagaccacggacgcttgaaatacacgccgccagaccaggcggggaaagaaggaaccaatggaagagaataccaccggtttggagcaggagaccgagaccacggttgactccttcatggatggattcgacggggcggagactctggaaagcccggcagaccagccggaagaacaggagccgaagcatgaagaaacacctgctgatgaagagcaaaaggcgccggaaacacctgctgctggcaacgaaaacactgacgccaaaccgggcgaaagcgttgaaccggagaagcaggaggcaccggaggcccaggaaccggagaccacaccgaaaacctggacgctgcgccatttaggcgaggacaagacagtcaacgaacaggaactgacggcccttgcccaaaagggcctggactatgaccggattcacggcaagtatgaggaattccggcctgtgatggacctgttcagccagtttgcgaacaaggcaggcatgaacaccacggactatattgcccacatccgccaggaagctaagagagccgaaggcctgaatgcagaagaggccaaaagggctgtggagctggaggaccgtgaggcaaccgtagccgccaaggaagctgctgaagcggagaggcagaaggagcagcgggacgccgaggctcagaagcagtccgcggagcagcgcaggatggcggatattcaagagtttcaaaagacatttccggatgcggcaaaggacccgaatggaattccgaaagaggtatgggacggcgtgaaaagcggcctttccctggttgccagttatgccagatggcaggtggcacgggcgaatgagcaggccgccaaggcagaacacaatgcttctgccatcaagcagaaccagaaaaatacggagcggtccactggcagcatgaagtctgccggtgcggacaacaagaacaaggacccgttcctggatggctgggattcctgatttcaggggccttctcgcatctggtgaaaagaaagagagggccacatggcagttaattacacagtcaaatacgcagacaaaatcgcagagagatttcacaaggcatccatcacggactccgccgcgggccacgaatattcctttgtaggagccaagaccatccgtgtctactccgtggatactgtgccggagaccgattataaccggactgcagatggcaaccggtttggcaccccgaagaacctgggcgacacgatccaggagatgacgatgaacaaggcgcctgcctttacatttgtcattgagcctctggataacagcgatcaggccatcgagaagtcagcgggaaagtccctgcggcgtcagctggacgaggtcactatccccaacatggataagtaccggctgagaaagtggtgtgagggcgccaacatccagtatcagccctccgcagcgcctaccaagagcaccattgtggagtacatcatcgatgtcaacgcccagatgacggacgcctttgtcccggtggagaaccggacactgtatatccccacggagtattacaagctgctgaagcagaacccggacttcatcaatctggagggcctgggcaccaaggcgctggcaaaaggcgttgtgggtgaagtggacggaacgaaagtcgtcaccattcccaagagctatctgccctccggcgtgtacttcctaatcaagtacaagggatccagtgtggaccccgtaaagctgcagcagtatgacgtgctgcccaaggtacagggctatgccggtcctgtggtgcagggcgtcacctactacgacagcttcatcctggcaaccaagggcgacggcgttgcagtgtgcggcagtaacgcggctgttctgtcggctcccacactgtccatctctgcgcacaaagtcacgatttccgaaccgggcagcaatgtgtacaagtacacggtggacgggaccaacccccggtacagctctactgctgagacctatccctccagcggcgtgacgctgacttccggccaagttatgcggtgcatccagatcaaggacggctgctgcggcatggaagccgacaaggcatacgagtaagcaatataggcccccgcaaggggcctattcccctagtcattccctgaaaggtgagcgcatggcaaacaagaaagcacgaaacaacagcggagccgtcaatctggctctgggagatttgaacccaaagcagaagcagttctgtcaggcgcggtctcgctatgttggatacggcggcgcccgcggcggcggaaagagccatgttgtgcggattaaagcgattggcggtgcgatgacctatccgggaatccggattttgattgtccgaaaagaatatccggaactggagcagacgatgatcctgcccatgcggaagctgattccggcagagatcgcagcatataacgccaccatgcacatgtttttcttctccaacggaagtgttatcaagttcggacattatagcagcggggacgatgtggaatatcagggccaggaatacgactggattttcatggacgaggcgacacaattcacggaataccagttccgaacactgggcgcctgtctgcgcggtgctacgaagtttccacgccggatgtacctgacctgtaaccccggcggagttgggcacatgtgggtcaaacgcctgtttatctctcgccagtatcagaacggagaaaaagcagaggactataccttcattcacgccacggtggatgataatccccagctgctggaggcgtccccagagtatgtgcagatgctggacttgctgccggatgatgtgcgcgcggcctggcggtatggcgattgggacgctctggccggaacattcttcccggagttccgggcggagactcatattatcaaaccgttctggaggattcctgcggagtggaagaagtaccgggcgttcgactatggcctggatatgtttgcctgcctctggattgctgttgatttcgatgggcgctgctatgtgtatcgcgaggtacagaagagcggcatcattgtatccgaggcggcaaagctgatgctggacctgacgccgtcttgggagcagatcgagtttacggcggcgccgccggatatgtggaaccggcagaaggacagcggaaagagcatggcagagctgttcatggaaaatggcgttggcatcattcgggccagcaacaaccgtgtgcagggctggatggcagtcaaggagatgctgaaaccactgaacagcgaaaaggaccggccgggcctgctggtgacgcaggactgcaaggggctttgcacgaatcttccggccatccagcacgacgacaaaaacccgtcggactgtgccacggaaccccatgagatcacccacatctgcgatgcctgccgttatttttgtgttacccggacactgagcgcggagaagcccgcaccgccgaaagtggaggacttcgatagcgccgggatgacggactacgacgacgagatgaccggcggagaaatgacagacgattatctgacctatggagggggtgactgacctgtggcaagcatttccacatcgaacaatctaaccattctgaaaatcaaggagtttctggggttgaacgaaaaccaggacggcgacaccaaaatcagagttggagagctctctgagatgcggaactttgccattaccagggacggccatctccaaatccgtccaggtacgcagacggttcttgcccttcgctctgcctgggatagctgggcggacagccaggaagaaggcgtggaagagcacccggtattctgcggctgctggtatggcatggtgggaggggaataccatctgctgtgcgcatttggcggtgtgatcttcgatgtggacattctgctggagagtgtaaaggcagtagggacctgtacccaggacaagacctcctttttcggctttgacgagaaggtttatctgctgaacggccatgagtacaagagctggactggagaatcagaggagacctttcaggatgtggaaggctatatcccgctggtacagacagcaaccacgccggagggcagcggaacacagctggagaatgtgaaccggctgacggggctgcggcgtgtacgcttctccccggacggcgaggcgaaagattttttcctgccggagaaagagatcgacagtgtgaccgcggtagaggggacggatgtgcagtataccgccgacaccgcggctggaaaagtgaccttcaacacagccccggccaaggggacgaatactgtgaccatcacctacaagaaaggcgatggcgcccgtggcgatgtgactgggatgcacttctctgagctctacaacggctccaacgatacccgtgtgttcctgtatggagatgggacaaaccggaccatctacagcggaatcaacggagacaccggcctcgcgtcggcggattatttcccggacctatacgaggcggccatcggggacagcaacacgccgctgaccgctcttgtgcggcattatgcccggctgctggccttcaagcgggacagcgcatggtcgatcacctacagcaccgtgacgctggacaccggaatcaccacgcccggattttatgtgctgccggtcaaccggcagatcgggaatgacgctcccggacaggtgcggttactggaaaacaatccgctgacactggacggcagcagcatctaccagtggcggtctacgtccagtaccgggaatatcacggacaatgagcagaatgcacggcgcatttcagaccggatcgcggccacgatcagcggttgggcgctttcggaggtcagaaccttcaacagaaagcgggagcacgaatactggtttttgtggaatggaaacgccgtcattctgaactacgcaaatgacagctggtattactacaccaatatgccgttccagcagatggtggatgtggaggatgacacctacggcatcacggaggatggaaaaatcaagcatctgtcccggcagtatcgaaatgatgatacagaagagatcgatgcctatgccgccacaggctccatggactttgacaaggactggctgctgaaatactcccctatgctgttcgttgcaatccagccggaaaccaacgcccggatcacagtgacggcacagagtaaccggaggagtgattacccggagaaggttgtggcatccagcttggcgacctttacccatgcggatttccgccattggtccttccgaaccaaccggaaaccccaagtggaccggttgaagctgaaggtgaagaaggcgactttctacaagctgattttcaagagcaagagcgcatccgcgacggcgactgttctggagacggacattcaactgcggtatgccgggaacgtgaagtaaggagttgagcaatgaagaagtttgatccgacacctcagaaggtgtctgcggagtatcaggctggggtccagtttaatcagggaattcagctgtatgactgcgtgaatgtcaatgagaactttttcattggcaagcagtgggagggagtacatagcaatggcctgcctactcctgttttcaatttcctgaaacgtgtcgttttgttttccgtggcgaatgtgtctacagacaacctgaagctccacgcaaaaccgctgccctccaacggaaaactgacaggtcaggatgcagagattttgacagacctcttgaatgaccaattccagtctattttcgagttcaacaaaatgggggcctgtatccgcgagtttgccaggaacgccgcggtggatggggacggctgcttgtacacctattgggaccctgatgtagagacagggcagccaagcaagggcgcaatcaaaacggaagttttgatgaacacacaggtgctgtttggaaaccccaacagccgagacgttcagagtcagccctatatcatgattgaacgccggatgctggtttctgaggccaagaagcgggcaatcgcaaacggcgtcagggaggatgatgcggacagcatcactgctgacagcaagcagagcggggatagccgcatggacgagctgggcggaaataaagttacggttctgctgcggctgtggcgggatgacgagagcggaaccatccatggttatgaatgcacgcagaatcaagagatcaagcccgaatgggaccttggaatcaagctgtatcccatctcctggatgtcctgggactttgtacaggactgctaccatgggcaggccatgattacagggctcattccgaaccagattttcgtaaacaaactgtttgccatgtccatgatctctctgatgatgctggcatatcccaagatcatcttcgacaagacgaaggtcgccaagtggagcaaccgggtgggcgcggccatcgccgtcaacggcagcgtggagaatgtggcgaaaatcatcgacccggccaccatctctccgcagatcagccaattcattgacttggcaatctcctacacccagcggtttctgggcgcttccgacgtggcccttggcgatacacggcccgacaacacctccgctatcattgccctgcagcgggcggcggcgactcctatggagctgacaaagcaaacgctgctgcaggccattgaagaccagggcaggatttacatggagtttatgggcgagtattacggggaccgctacgtggagattcctgttgaccagacagctctaggtggcaaccgtgtgatgttcaccatgccggggtctaatgggaaggtcttagctccgttcgatttttccagcctgaaggactactactttaccgtggacctggatgtgggagcatcctcttactggtccgaaatcgcctctatgcagacgctggacaatttgctgatgcagggcaagatttccacagtggagtatttgaagcgcctgcctgccggtcagatcacagaccgggagacgttgattgcggtattacaggcagaccagcagcggcagatggcaatggcgatgggcggcgcaggcggcaactccgggaatgggggaggccccgcgcctgccgggcaggaaaatccaccgctgcggggcggcgccggatatggggcgttgcagcgggttatcaaccagacgggagaagttccgcaggaaaggggggcctgatacatggctctgtcgaaatttgagaaggacatggcgatcatctccgctctggacgatgaaccgaacgacgtgggcggcctgacggctgcggagctgaaaggcaaatttgacgagggcggtcaggccatcaaacagtttttgaatgagacgctgacaccgcagattgactccgaaaaggctggccgtgatgaattggaagggcttgtcctggggcagattccggatagaacaatcaccgttgaaaagatggccccatcgttctttacgtccattctgacccctcaaatccaagtaacctacaacggaggtgtttaaatggcacagcagttaggacaggtggccgtcggcacactggtaaagctcaatgagaatggttccccggtggaattctatgtggcgaagcatgattatgagagcggtttaaacggagccgggcggacgctgttagtgcggaaggaatgctatgataatcgggtgtggaataacattcaggtaaatacatacgcctctagcgcacttgatagctggctcaacagcgattacaagaatcttctggactctgattttctgacggtaattgggaccacaaaatttcaatataccattggttacggagataaaacattaagcacgttagaacgagcgatttttcaactttccagaacagagcttggatttacgctcccggctgatgcaaattttgagggaaatattcttcctatcgcatcgattttgcaaaaagcttttttgaacggggaaacgaattcgcaatggactcgaacaccaaatacatcttatctcacatctgccttttttgtatatgcaggtggaagttctgattcgactggcgttactgcagaagctggcagccgccccgcttttaccgtcccttccacattgagcgtaactgacgatgggacactctctctggcgtctgctcctccacatgcgataactgtccctgttcaagctatgcagggcaaacagcttgcagtctcctggcctgctgtggacggcgctgacggctacattctggagcgcaaagcaaacacggacgctgactgggtgcaggtgtattctggagccgatttgactttttctgaaactgccgggacctgggaatcggttcagtatcgggtaaagtctggcgccaatggaaaatatggcgaatatacaatcagttcccttgttgatgtagttcctgtttccgttctggtaatttccgggtccgacggcagcttgggcactctcacaaatgatgtgcagtattcggtgtcctccagcggaaccagtgctttgacggttacggaatctgctggacgaactacccgaacgttcacggcaacaaacggtgccaccatcaaaatccccgtgatggacctgccgaccggcagcggcacgatcaagatcacggcatccaccaatcccggaagcggcgtggtaacggtgacgagatcgtggacgtataccaagacggcgccgacgtttgccaataccggcagcacggctcaactgcaacagaatgggaagaacattttcccgctgacactgctggagtgtgtgcgtgggacagaaagtctggctcctggcgggtttggctttggggatgcggtgcagagcattgaaactaccagcgcaggagaatcctatgagacatactgcgccaaggtagacgccgtactggacgggatgcctgacaagaccgcaaaactggtgctggcctatccgcctgcggtgtacggcaaagcgggtactacgatatcgctcttatataagggcgacgccaactatgcagtgctatccaatatcggcagtgcagacacggggctgtgcggatggcggatgataaaattaaaaaaatcatcgtcagacccgtctgcttggcagccgtttgagtgggagcatccccccatgcagttgggcgtcgagtaccgcaccgtggagcggtacaacggcaagccgatacacatcaaggcggtgagtctcgggctgctagaaaataatacttctaaaagtgtggagcatggtatatctgattttgagtcatgcgttgaatgcagcggatttagtggacctataaatcttgtcgggagcggtggtgttgattcaatatatgcaacaacttctcgtgtcgggattgatacaaatggaagttttagtagtgcagcaacatcatctaaattaaatactgttgcgattatcaagtacaccaaaaccacggattaaggagggcaccatgaagatcatcaaatatcagttggcaacagagatcaaccacggcacccctgaggaaccggacatcgagacggtgttaactgctgttgttgtgtcctatacagaggaggcttacgccatcgcccaggcggaggcataccaagggcagattaccgtggaggacgatggacagccggagccggaaccgggagccgaggacattactcttgatatgctggcagaccatgaggaacgcctgtgtatgttggaactcaccacaaccactgtatgacaggaaaggagcaggaccatgacaactgtatacaatctttgcaagctgctgattgaccggggccgcactgacggccttcaggagaagatggacgtgtatctcgccgccgacaggctgaccccggaggaatacagcgccctcagtaagatgctgactgcggaggcggcagagtaaaatggacgagaagtgcatcctggacccgcaaagggattgcctgggcctccagaaagccaacatgctggaaaagcagatgtcggaatggcgggaggcgtcccgcaacacccacaaagaactctttaaccggatgcgggaactggaaaaggcggaggccgcccggaatgagcagtacgacaatatcatggagaagctggaccggctgatctcatggcaggaggccgagcaggccaagccgaaaaagcggtgggaggccatcgtggacaagtccgtgtgggcggttctggcggctgtgattgcgtttgttttggcccgcattgggctgtaaaaaagcgacgcccccgaaggagcgccgcgagtgccccgatatggaaaaaagtaaaaccacatcaataaggaggggggcacacctgcatcttacatcatcatcaaccggcggtcaagccggaaatttgaaaggagctaccaatcatgaacaagaccatcaataacatcatcgatgacttcaagagcggcaagattactgtggaggatgccaacaagctgctggttgaggctggcgccggattctccctgaaccccgaaaagaaccccgatggcggatggaccgaggcagagatggcggagggattccttcccggcgaggaaaaggagcctcttccggacaaggtagacatgggccgaaatcaggcgcttgccggacaagtggttcgccagaataccaagcgcggaaagtttgatgtgacctatgatgcagacggttatgccgtcaaggccatccgagtgtaatcgggaggtctgatatggacatttcctctcttggcatcaccggagtggcggctatcaccgtcatctgcctgctgattgggcagggcgtgaaagcgtcctctctggacagcaagttcatccctatcatttgcggtgtctgcggtgctgtgctgggtgtggtaggtatgttccttatgccggacttcccggccacggactacatcactgcggcggctgtgggcattgtgagcggtctggctgctaccggagccaaccaggtaatcaagcagctgggaagtgacagtaaatgagctacacgataaaggagcagctggcgaactccgggaactatggcggttcccggaatgccagccaaatccggtatctggtgtaccactacaccgggaatgacggggacaaggcggcaaacaacgccgcgtacttccagcggaacatcgtcaaggccagtgcccattactttgtggacgataccaccgtatatctgtccgtccccgatctgaagattgcgtggtccgtcggcggcagcaagtacgccaacgccgacaagactggcggcggcaccatgtacggcgtcatcaccaataccaactctatcagcattgagatgtgtgacaccatccggaacggtgtctatcaggccagcgaggcaacccttgccaacgctgccgctctgggccgggagctgatggagaagtatcacatccccattgagaacgtgtaccgtcactttgacgtgactgggaagcactgcccgtcgtacttggtgaacgcccagaagtgggcagagttcaagaagagactggaggtcaagatcatggacaatacacccagcggcgcccacaaggagggcgtggaatgggccgtaaagaacggcatcctgacgggcaacagcgagggagacctgatgctctcccagcccgttacccggcagcagatgtgcacgatgttgcatcggctttgggagctgatcgaaaggacgtgaaactgtggcaactgcccgtgtcagattaccggatagcctggatggccttatgcgctccgagatggagacggccatccgggaagctaatcttgggaacgacgatacggacattgcccggcgctacctgatcgaccaagtcccgcagatcgacattgcagcggagttcggctgggagcggtcaaccatctcttatcgactcaaacggattctccgcaaagttgaaagcacagctcaaaaactacatttcacataatttcacctaaaccccgcttgggaaccacccaggcgggggctttttttgcgaaaatatcatcaggaggacgtaaggaacaagggctggtacacgtcgccgccctccttgcggcctcctgatttcaatgataaggacgtgttttaagttgattctgaatggttcagaactggtggcccggttggtggcctgtggcttcacggagtccacagcaagagacacctgcgagaagtatgcggcggagggagatttctccggattggaacggtttatccggcagaatgagcttttgtatgacgaccgaaagcaatatgtttgaattttacaatccgaacccctacgagaaaaatgtgggggattgcaccgtccgggccatctcgaaggcgctggagcaggactggtacaggacatatcttggcctctgcattgagggcgctgtgaggggtgatatgccaagcgccaacgccacatggggcgcttacctccggcggcatggcttccggcgggacatggcgcccgaggatatgaccgtggcggagtttgcgatggggcatccaaacgggacttacattctggccctgtccggccatgtggtatgcctgcaggatggtgtgatctacgatacatggcacagtgaacacgaaactgtgctgtactactggcagaaaggatgacgtgagatgccgaactatccctattactatcagccgtaccaaccgtatcagccgcctatggcggaccagctgacgcagctgcggcagtcctatcaacccatgcagcagccgcagcaagccccggcatctccgtctattgtgtgggtgcagagcgagatggaggcggcaaattatctggtggcgcctaactctgccgttaccttgtgggacagtaacgccccagtggtctatctcaaacaggcggacgcaagcggcaagcccagcatgaagatatatgaccttgtagagcgcaatcagaggcccgtacaggccccgcaggctccaacggtagagtatgcgcccctgtcccgcttggaagcgttggaggcccgcctggatgcgctggcggcaaaagataaggaggatgcagaatgaacccgttttatcaggctatgggcggcaacagacagcccaacatgatgcagcagtttcaatccttcatgcagcagatgcggggcaaagaccccaacgccatgatacaagagatggtatcctctggacgcatttcccaagatcagctcaaccaagtccaaaagcaggcccagcagatgcagggcatgtttgaggggatgcggggtatgtttgggaaataaacagcaggggcattaagcccccgccgttcggtcaggttttgtgtggactggctctgtcatcattctctcaatgctccagccacgcacatatcggttgtgaaatgtgacccagttaattcctaattcttttgcccattccacaagcgtttgagtccgtccattgtactcaatcacaatgttatcggacttgtttatattctgcgttttcatcgttgcccagcggcagttctcaggacaataggggccgtcattatcccttctgtccagcgtataaccctccggcctaccgccaatagaatcagaccactcaacaaacttgaaaaaatcatgccattcttcgcaaacataaatcccacggccaccataacggcgatagatttttgacttctcattgtaacaccgttgcatcatctgtcgccagattccatacaagggatgcttactgcggccgtcttgtttggtgtagatggtatttctgagacaaccgcaactttttacggctccgtttttgaattgataaggcaatacatcaattgtcccaccgcaatcacatcggcatcgcaacctccaactggtatcgtctggctttctttcagccagtccaattacagtcaagtaattgctccgttttccgatgtactcgttcacatcgaaatatggtttatagattcttttttgttccatcgcatttaccctttcatgcgccctgattgtcagattgcgtggaaaccgtcagggtaacggcttgtcgggagcgaccctatccacgcataacaattatagcacaaaaacatcaaaaagtatatagatgcggccgcatttataaatatttttacaaaggagaaagttatatgtctcttagtaatgacgcaactctgactatgccggtagctcctgcgtattccgctggtggctatggcggcaatggttccatgtggggtggagactggtctgcctggattattttgtttctcatttggggggcctttggaggcggctggggtaatggcttcggcggaggttttggcggagcaaacgggcctggattccagggttacgctacacgctccgacatcaacgagggcttcgccctgaacggtctccagaacggccagacctccatccgggatgccgtgagcaacggcttccatggcgtggataccgctgtgtgcaacctgggctatcagacgcaggcgggctttaacgccctcggcgcccagctggcgcagtgctgctgcgatactcagcggagcattgacggtgtccgctatgacatggctacccaggcttgcgatacccgcaacaccatccagtccagcacccgcgacatcatcgacaacgccaatgccaacagccgcgcgatcctggacttcctgacccaggacaagatcgctactctgacggctgaaaaccagagcctgaagttccaggcttctcaggcggcgcagaatgcttttattaccgctaaccaggaagcgcagactgccgagctgatccgccgcatcaatcccatgcctgtcccggcctatcaggtgcccaatccttatgccggatgcggctgcaatccctgtggctgcggctgctaaaacccaatacatcaacttgtaagaaaggcttacatgttcggccccgtgccgattttgaaccatgcggcggggcaacagcctcgccgctatctttttgaaaggaatgaagtttatggctgaatacagcaacagcgcaatcgtaaccgttgccgctggtcagaacgtgccttttaccgaggaggccaacacgggcaagccctgcattgtgcatcgggaaggcgctgggctggtgactcttcgcgggcttacgaaccagtgccgcgcgaaattcaaagtctcctttggagcgaatattgctatccccaccggtgggaccgtggaggccatcacggcagcgatctccatcaatggtgaggcgctgaacgcttccaccgctaccatcaccccggctgccgcagaggatttcttcaatatttatgtttccgctgtggtagatgtccctcgcggctgctgcgtcactgtcgccgcaaagaacaccagcacacagcccatcctcgttgccaacagtaattttattgttgagcgcatcgcgtgaaaggagaaccgatatggaatatctgtatgacctgaaagaaaagctctgcaaggagctggaggaatatgcccagaaaagcaacatgaacgccggggacctggagatggtccacaagctgacggataccatcaagaacgtggacaagatcatgatgctagaggagggcggttacagtcaggcagccgacatggactctccttccagctatgccagaggctccagctatgccaaccgtggcaagcactatgtccggggccactacagccgggacggcggctactcccgtgacgggcgcggcggatacagccgcgacggctactcccgtgcccgcggttattcccgcagtgaggcgaaggactccatgatggagcagctgggcgctatgatggaggatgcatccaatgaccgggagcgggaagcgatccggatgtgcatggagcatctcaatcaggaataattcccacaaaacaagggggccgcttgcatagcggccccttttgttgtataattgttgtacaacttgataacaagctagagcgttcagcgccagagttcggagtgatccgggctttggcgcttattttttttgaaattgaggtgaaattgatatggcagctgcagaggagtctatccgcgggaaaaccagaccggatatgtccagaaacgagggactggctgggcagacggtcacgaagggagactatgaatatacctacgatgataatgggtatgcgaaaaaggccatcaatgtcaaaaacagacaggaacgggaacaggaggggtatggtggaggcggatattccggaggcggagactcttcctattatgactctctccagcccacggacctttctggatacctgaatgacatgtacaaagcctacacggacgcacagctggcggctctgaaatcggcatacgaacagaatttggcaggtctgcaagcagacgcggagaaaattcccggcatttaccagggcgcccggaatgaagcggcatctcagaatgatattgcccgaatggcctttaatgagtacgcaaacgcacgaggcttgaacaccggaaccagcgggcaggcggctcttgcaaactccgctgtgctgcaaagcaacctcacggacatctccacaaaggagtccgatgccattgcggaaaacgccctgcaacagcagcagctggcgattgaataccgcaacgcggcagtgcaggcgcaggcggaagggaactaccagatggcccaggccctgtacaatgagtatgtgcggcaggacaacgccgccatgcagacggcacagcttgcccaggagcaggccaactgggaagcgcagttcaacgctggaaacagccagtggcagcagcagtttgacgcttcccagcaggagtatcaggacagcctttcggcacagaaccgggaatatgcctataatctggcgatgacgatgctggcggcgggcgtgatgccggacaccaatacgctgaacgaggctgggatttccacagccgacgcgctgaatatgcggcttgctgcaatgtctactggcggttcggacggcgggcggagaagtacaaacacttctggtggggattctagtggcggcgatgaaggaaacaaaatcgagagcaccccagatacagaaggcactgtgaaaaaggcagaccgtgacaccacaattcgaaatctgaatggacgtctgcaaattacagacgcctcccaacttggcccagccgcaatgaatattgcaaacgccatgagcaggtcaaactcggcatcacagctgggaactattggtgaaatgatttcgaatgcacttgaacgtggacagattacagaggcagaagcggactttctgcttcggtctatcggcctttaacggaggtgtctatggcaagcatccaagaccggcttaacaagttgcaagaaatgagccgccagcaggtgagagacagggagcaggaaacgaacccaaggacaaaggcaactaagaaaagcgcccctgtctctcagaaactgcaaccaactatacaacccccaaaaacaactgatccacggcaggaccacatcaccgacattgtggacagcaccacgggcaccgtgatccaggtggaccggccctcccgtctggggagcatggctaaaggcgcggtgcagggaaccggtgcaaactatgcctcttccggcgggtctttgctggacctgatgcgcagtgtggacaccgccaacagcttttccacaaagcgggccaatcaggaggctgagaacgcagcccactaccgggagatgttgaaacgtgggacgttggatgatggaacacccatcacggcgtctatgcggaaacagctggagaccttggcggcgcgtgcggagcagcggtccggcgtctaccgccagggagcggaggcccagcacgcccccatttcccgtgccatcaactccgcctatgagacagcggaccgcctatctgagcagtctgcggagaatatcgcggcggcgaaagaggggcttggcggtctggggcagtttgccgtggacgtaggtgtggccgggacgcagctggcaggggacgccttgatcggcgccctcctggctcctgtcaccggcggcgcatcggcccttgcccccatggctgtccgtggctttggctccgggacgcagcaggcccggcaggagggggcgacgctggggcaacagctggcctatggcgcggggagcgcggcactcagtgtagcgacagagaagatcgccaacgtggccgctccgcttcgacggacctttggttccggtgttctggacaatgctatcgcaaaagcaaccggacgcctgggccagagtgcggctggacaaacggtcctttccgcattgagcgaaggtggcgaggaagtcgtggaagcactggtgcagcctgttttgcaacagatcacctatgataaaaacgccctgcagcaatatcaggacccggactatctggcagacaccatttatcaaggcctgattggaggcgctttgggtggtgcgcttggagctgctggaagcattggccgcaggagcgccgaaaatgccaatcgccgggccacagatgccgcaggaacggcgcaaacggaaactgcacccgtttccaccacccaggcacaggaggctgcagagggcactacaggctttttggagccaacgcttgttagccgtgtacgtcagtctattccgcatatccaaaacatgaatccggttgccgaggttactgggacagaaatcccccgaagtggaaaactggtggatcggcttgcctcttttgtcaatgcgattgggaataaggtcaatcggcccggctttggtgatgttctattctccagggggagaatcaagtccagcatgatcggacatgggacaggcccttccaaaatcgagacatttgcggccgtcccggatgtaatccgaaacggccagcagattgactatcaacagaactggaaagggctcggctatgatacctacactttcgcagcgccaattacctaccgggggcagcctacttacttaggtgtcattgtcacgaaggacagcgccagcaaccgctactatcttcacgaggtagtggatgcaaatggagacgtcatctttagaaatgacgaatcccccgcatctacaccagacggaacttctgccctttcgggtgacctcgataccgtagtagacgcgggggatggtgcaggaacaacaccgggcactgtcgacaccgtgacagacgggcgggcctcccgaggagttcctgcttctaatactactatagcacccggcgcggaaaatgtcaattcggacgctctggcgcaaattctgtttggggatacccggcaggaaaccggagacacacaggcaccgccaacctatgacaacctgggcagcgcccggcggggcttcaccacccccggcatggaagggcaggagaggaccagccgccttgcggagtccatgccgtataatcaatatcaagaagccgccaccggcctttcacgggaggactatgccaagctgttccggtatgaaagccaaacagaagggcgttctctcaatctggcagaagaactggtgtacgccgttcgggacggccagcggaccttcctgcgagacattgacgagacggcttttcatgagttggtgcagtccctagatgatgcgacggcatggaatgcgccccagatggatgccgcccggatgatccagcaggagctgcagggcaggtccgcaaatctggagatcccctctgaggaatatacggacttcctgcggatcatgcgggagcatgagactgccactggtcagggcgttcaggcaaacgccaagtggagccgccgggacaaccagaacggacaatcttcggagctggaggcgtgggacaatctgcaaaactccaatctttccgaagaagagaagcgcagcaccttccaacggattgtgaagtgggatacggagatcgagcaggccgcagagccgcagcagttgaaagacattatcctgaacgttgcacagcagcggggcgttttgaatggcttaactggtcggcagagccggattatgaccgcggttgcaaacagcagcttggactccctgacattcgaccagttgaagcagttcgcctatgcttccacttctgcgctcagcaccgactccacaccggccaacatgggtcagaagatcaagactatccaaatcctgaacatgctgtccaaccccaaaacggcggtgaagaacatcaccggaaacacgtctttctacggcctggacgcgctttccatgaagggggcggccctgctggatatggcgctgtccaaagtaacagggacccgcagcgtggcctatgaacgttccaatctggggcaggcagccaaggcgatgcaaatggcgattgcagaaatcaccatggacgtagacatgggcggtaatcagagccggtacggcaccagcagccgccggaccttcaaagccagcggaaactttgtggaccgtgtaatgtctatgctggagcggaaccaagcgtaccttttgaatgccacagacgaattctacaagggccttgcccgcagcaatgcgagccgtacccaggcgctggtcgaccaagggaagatcaagactactgacaaggactatgcacagaaccaagctgacgcacttgcacgataccggacgttccaggatgacagcaaactttctcttgcgatccagcaggtacatgatgtactgaatatggttgctggcattggtgacagtggacggagcatccgcggccgtacagtccatgccttcggagctggtgacattgtggcgccgtttactcgggtagccggaaatctggcatctcgcggtttggagtattctcccgcgaacgctgtcaagggtattgtggagatgggtaaaaccgtggcgcaggctgtcagcggtcagaatgtggacccggctgcacaggcccgggccgtctctgacactacccggggcctcaccggaaccgccattgcttacggatttatgcttttggcccagtcggggcttctgtctcaggcaggggacgaggatgatccggacgtggcggcgctgaattccagcgagggcatcacgggaacccaactgaatatctccgcaacggaacgggctttgtccggtggaagcacggaatggcagagtggagacaccctgatcgacctgtcctccatcgagccgctgaacctgttgatgaacctgggaacggagatggcaaagagtgaagggaaccccatcgtttcttcttttaatgctgtgccgaaatcctttatggatgcaactgcggagcttccggtgatgcagttcattgggaatgcggcaacggacatcatcaaatatggacaggacccacaggaagtattactgcaggagggggcaaacacggtagcttcttccctgataccaaacattctgcggtctacggcccgtgggctggatgaccgaccccgcaatacctattccggggatacgctcggagagcaggttgtggacagcgtgaagaacagcatcccgggtttgcgagaaaccctgccggggtctgtcaacccactggggaggaaaagctgtatcaggggagcactgcggaccgcctgctgaacgcgctgctgaacccggtgggagtcaatacctacgaccagagcgaagtgtctcaaaacatggaagcgctgcgcgagcggacgggggagacctccttctatccttctaagagcgccccatcggagctctcgtacacaaaagatggcaatacctatagcaagtccttgacctacgaggagcggcaggactatctccgggatcgcggcgccgtcgcactgactacgctgtcctccatgatgggcagcagcgcatacaagagggcgaatgatactaccaagacggagcttttggacctctgtaatgactacgccagccaacgggcaaagaaaacgattctgggagccgacagtgttccggcatgggtaaacaacgcagagacagcgcagaacgatcttggaatatctccagcggaatacttggccctctatcatcagtacggcgccgagatcatgtctgggacggcttatgagaaaacgaagcaggcagtggctgccggtctgactgtcgaacagtatgcggatatgaagaacggaattgatgcggacaagaatgggtacaaatccaaaagtgaggccagggcttatctggatagccacaatttcacccaagagcaaaaggcggacctctggacaatcatcaacaagagttgggagaaaaataacccctacgcataagagaagccccgccagacggcggggccttttctcactgtttggagatgatcgttttcagaaccggaacaacgctttcgtagtatcggaaggacgggacttcctttccggggcagttcttggcaacgtcattgacccatgtcccgtactgcttcgttttcaggtggttccggttggcgagcatcccgaccttgtttgcggagatgcccagtttttcgccgatctcctgtgctgagtacatcttttccccgatatagggcagggggagcaggtattccccagtcagctccttggtagcgtgggcctggagaacctgtctgtaagtaccgtcatactccttcgccagacgctccaaaagctgggccttgcggacgcggatgctctccatctggtagtcggtcattcccagccgctttgttttgccgccttggatatgttcccgcatcttctcaaaggcggagacgtaggcagcagtgaacaggacgcccttttctccggtcatcttgttcgccaccatgtcgcagcccttcttggtcaacaggtagcagggatattgtttgccgcgactttcaaatgtgctctcgatgaaaaaatctgacggcgcaattttgcgctgcgaaatttcatcggatttttccatcacttcaatgtatccacggatatcccggagcaaatccttatggttccggtccgtccattcagccacatcccggctgtcgaccacttctgcgtcattgaaattaaaaactctcagttcgttcattactggccctccttcatgccatcctctacgccgagcaggtaaatccgatatacggttgctttcattgtatctgcaaagatttcatctttgcattttccgggagcagtgacggacttccttgcaccatcccatattctcatatactcttctagaacttcatccagggaacgtcctttcgagattgcgtccagtgggacacctttctgttcattcattgtgatacctccatagatttttgaacttgttcatgcagttgctctagagagccgcagatggcgttcagggcagggaagtaaatgctgcggacacgcttggaaaacatttcgttcagcacctccgggttgaacccgtccaggttttcatgccgctctgggtcagagtcaaattcatcctgatcggcagcttccatcgtgatctgaaatatggcgcaaatctgtttcagcctcacggcgacagtgtccatctccatatccatatcagtcaccctccttcggctctttggtggtaatgatgatgttgtccggggtggtgccgacataggcggcggccaccgcaaggaccagataccgggtgttggatgcctgattgattaactcctgaatcgtcgcagttttgtccatgataatcctccgttcaatttcttcttgacgggaggtctccatgaaggtagaatggatttaccggcagggagacctccgggcggagaaaacagctcgtaactttccacggtgccgggctgttttcacttttttgtggctaaaagtagatggattccttgccgtatggcttcaccacgagaaatattgtgcttctcgcaatattctctgagggctttttcggttcccgggtctaacctgattgtcaggtttacacccttcggattatctactttcggccttcctgttctaggcgacatttcatcacctcactttttgccttgcatttaatataatttatgaaaggcgaaaagtcaaggagaaaattcacagtatatcatggacagattgtggctctaagagaaaaaataattttctgttaagtcttgctaaatcctgtcaatcggtgtatgctttgggcgagggaggaatgaaagatgtttatgtcttttttgttggacatcgtttacgctgtcacatacaacctgattctgattgtgtttgggttgattgcggtttcaaaagcgaaaaaagggaagaagtcaaaaggctggctgattgcaggtgccattattcaaggcgtgtcagttgccggtgggattttgggaaatttggggtttgggaatgcacagccgataacatcctacggcatcctttcttacattttgtatgttgtgctgattatcgcttttgcgcttctgattcgaaagaagaaaactgtatgagagacctcggcggggcgggtgccccgcctttctcattcctcccggtattcgatgtacttcttgaatggggcggattttgctgtgccggaccgggccttgacgatacttccagaagcccactcgccattatccagccgcttggctttgaaaaggatttctctcattgggcacctccgatgatctcgtcaaaggtatatacctgacccttttcaacagacgggaacagatgtctggtgattacttctctctgaaaatatgtgccgtctacaatttccaggcactgcgtccatgcaccatcgtattttattgcattgatctccgggagcaaaactttgattgccttcgccctctccacctcctgctcggtgaagcggggcttgcagatgatgcaatcagcgttattgataatgtaacaaagttctccggaggtcacttctccaccatgtgcatttctgatctctccatctgtaccgacaaaataacttttcggctcatcaaatgggaagtcattaaactggaagttctggtttacctcaacccccagcacctcgcaaattctcggtttgtccatgttggcctccaaactttcacctttgctatcattttttgtaagtacatttccatcttccaccacctcatagcccatcaggcgagcggcttcgtgagggttggctcttacgtattcatgacacggcctctttgtccctgcgtattgctgcacgggttcccgaatctcgcaatagtcgcaatcttctttgctatcgcaaaactgcgctaatgcctgttcaatggtaagtgcgacttcgcccgtcttactccgaaacttcatggtcggcctccttgcccatgcgggcaccacaatgacaatatggttcttcttttagctcctctcttccgcataagctacaacgaaatgatgtgtattcatggagaataggatccccattctggtcatattcaactggaatatatgtatgatggatttctggattccatctcccgtgtcgcaccggggcaacgtcagcggcggggatgcctttgattgctccgccaatattccaagccacggtatcgccgcaatagtctgccattctaagccgatcttcatattctttctggcagatgtcgagtgcttccgccctctcgatgtactccttcattctctccacctctgttcgtggtcgtctgcaatccgtttaatgatttccagctcttcatccgtcagcgtccggttccacgcaatggaaaaatcgcccgtacaccgattcgggcaggccgtacactcgcagcggttggcgttgctggtatcattcaccctgaatgggcagctgtggttatagcagtcagttctaatccctaattcccgttcgacaaattcagcgggatacatcggcggtatagttttattctccatcctgctcctccaatacggtcatatcatagccgctctctataaatcggatcgttttttgatggtcgcaagcgttcccgagataagtgtaaatctctcgcatatcctccacactgaacctagtgtcaagatattgatttataccattcaggaagaaaatatgaagggctgtattatctactgcacggcgaaacggcgtggacttacaagccgcgcgggaaaaccactccaacaccttgcactttacatccagttcgctcttgcaagtgctgatattgaaatacacatttgccttttggtgggcgataaactccccctgggcgttgatgaaccatccagggaaggaaagcccaagtctcctaatgactgcccaatcaaccatcctgctccctccgtagtgcggcctcctcgcgggtcaggaaaacggttttaccgctatattcggtgttgccaattttgagccgccatttcccgccgtcaaagtatgtcagccgcttcatgtcagtcctcctcatactccgggtgtacgcccatgcaacagtcaaagcaaatccagccagtgggagaacattcatctctcaccatctcgctctgctcataccgttccccacagataccgcactttcggtagtatttacgctttttcatgtcagccctcctcgccgtcccacttccatgcggggcaaagtttgtgcaggtcctctactgccgcatccctctcccgcttcatctgatctctctgattttctacaatttcaatacaccgcttcacctgttccagctcggcccgcagctgctcgttttcggcccggagcgtggagagggtggtggcgccatcaagtgcaacgcctcttttcaggtccttcccttcaaaatatccgtttagctgctcaatcagcttctcaatgtccatcaggtgtccacctccactggttgcttcatccacttcaatgcagcttgcctgcacccttcataaatcggaatgtttggataagcacagatgaaattgcatactccgcctttttcatgctcacaacacttacaaaagtcggctctgagaaaaatgtccgccagttcctcgtcgctcatggcccggattttatctgcgtttgtcatgtttcatcctctccctccggcgggcggcggtaaaacacccaatgcgggatttcctttacattgtaaatgctacctgcaggtgtgatgatatgcccatgctggcacagacaccagtacccgttcccgccctcgatgggtttgcaggcaacccacacaggctcgtccatctcccgcagttcctccagcgtcagcggctcgttcggcggggtgagggtgggcgtgaagtaatcacacccatccgtacagaaacagcttgcgttctgcgattctcggctcgcccacagcgcacataccttttcgtgcaggcacttcttgcaatcaaactcttccatctttcagcgcctcctcagtcgcaatcatctcgattaccggaacaacttcaaagtctctgtcccacgaagaacagccgcttctagcctgcgcctcagaacgatatgtcttgacggatacgtcttttatttcggatatgggacgaaaactaaaagcctttgctagaccgcaccagacctctgttctgtttttccgcatgaccacatagcgcttgcgctcaatccgcatcgttcaggacctccatccttttcatcaccatctccacttccatcttgatcccctccagcatctccatttcctccgcgctcagaatcggcgcgcgggtgttccaggccaggcgggcttcgtgttccgtcttataccatccgctgttcgtaaaacatttcatgcagatcacatttctgcggacatttggctgatagtaacgttcgttccgcacccttgcctgtcctctgcacataggacatggcaccagcacccccgcatccgtcagccgcttcgcagcatctttatttccgagcatggctaatttgacgtcatccattacaaattcctccccattgttctgccattgcctgagctatgcctggaaaggtcttggcccgattcttctgtcggtctttcccacctcgcatgaaccatgttccagcttcgtgacagctgcatttcgggtcaacaatgttagttggctccaaaggaggaagtcctttcaaccacaggcgggtctttttctgaaccgggtgtccgaacatccacggctggacctcctgggtgtgcggcggcatttcataaatcttgctggatactgggttctccacacagatgtgcgggcagtcggcattcagaaacctcaagaaaaatgcttttgcctcaagccctgtccgatagcgctcctgattgagaacgccccccttgaacaggtgttttgctccggcgttcgacagatatgtacaaggcggaaacgccagaatcatgtcccactgcattttcagcatctccaacgcgtcacattggatgtgccactcaggatggcctccgctgcacggctcaatgtcgcagctgtatgcttcatgccccagcgccctgaatgctttgcacacttcctgagactcttcacaagccaccagcactctcatagcttcgccgcctctttgtcgcccagcagggcgcgcttttcatccgtcatagtcctaaatcctcccatgtgatctgccgttcttccaggtcaaacctggaccccatgtaaatgatgttgtcatctgtccggaaccgcccagggaaagcaacgttttccacgtgttggagctctaagagcttatcccatagctccctatggtgtgcccgcaaatgtcggaactcattgtcactggtatttgggcagaagaagcacccgccacgcttacagaactcataggctggagagaggagcccgtatttccggcagagttcgcgcgcatccttctgggtgtatccgtatttctgcagcagggatattttctgcccgcccaggcgcagcagtctttcgtcctcgtctgctgcatatccgatatactgtactgctcctttatgcgcccggcgaaaccggcccagcggaggtgtcttacagcgatcttgcaccttgcaaaaccccggcgacgggaatccttgatactttccggcccgcaacccctttttgatctggtgccaaaacacgtccataaacgtcttttgagatcgcagaacctccacgcgcacgccatgttcctcaaaccacgggattgctatcccgtggataaaatctgcatgttccgggacctctccgctggtatgcgcatcaaacatgacctcacagtataccaaggctgtcaaaggctccccgtgctcgagagcaagcagggctgttgccgtactgtctgcgccgccggaccatgatgcaaaatgctcagtcatgctctcttcctttccagcgggcggctctcatgcttccacctccgacggatagactgcgtactggcccttgccgtaacgctggtattgggacgccatccgccggaaggactggtattggatgcccagatattccgcacactctcgggcggtgccctcaaaggcgtattgcccgtccttgccgtagatggtgtacatcttcaggcagtagcgacgcggtatccgcacacgcccatatttccgggcccagatgctgacggtcgaaacggacacattgaccgctttggcaatgtccttctggaggcatccccggtccaccatctccagaatggtttgcagcttcttagttgtcatgacttgcctcccattcccggtacagggaaaaccagtcctccgcccgcatcgtcaccagccactcgcagcggctccgccggtgggctacaatgggatattcccaaggaggcgcatcgtgcttggcctgggccatggctgcctccaaatccagccgctccacacgcttgacttcctgatggatgccgggcagccctacaacgtcagaggcgtccccggtgttcccgcaatactgagccgtgcggcggcagtcatagccctgcccacggcaatagctggcccattccagctctccgcgcttgcctttttgtttgctgttcatggttcctccttgtggtgatacatttcccggatgtacttccacgtctcgtcgttcatgctttgggcagtaggtttttccttcccttcctgcttcctgcgcttttcccaggtgattacagcctgtttccagtccttcatgggagactgaccgatcttccagcccttggaggcgtagaaagcaacaaacgactctgggtctaccccgttgttccgctcctgacaatatgccctgacttcatcgactgtcggaggtgaaaagcgtttccccctggaagagggggtagggggagtataactatcgttctcattctcttcctctctctctacctcaccctctacctctatctctccctctatattgctttccgtttgcttccggtttgctttcggtttgcttccgcctcgcttcccgtttgctgcctttttgcttgctttgtcaagtatcggttttacaagcaaaaaggaagcggatgcctgtcctgttaatggcttgctttctccctcgaacacataagtacaaatcgccgtcacaaagggaagctggtccttcttcggaagcacttttaacgcctcccagaagctgcggtaaaaggtaaattggtcacgttccaagcagttcacccgccttaaaacggcagtttgccgtcctcttcgccgatctcggcgaagtctgcggctgagacattgacgccgccgctctggatggggaagtgggactccttttctgtgggccacacatagtccgctatcaggtctgtataggttttgccgttgtactcccggctctccagccgcccggcggcgatgacccggtcgcccttcaccataacggacagctggcgggccagatgcccccagcccttgacagtcaggaaagcggcggttccgtccttgcggccataggcccggacggagatggagccgacctccttgccgttgctggtgatgcggatatcgccgtcacaggtggcctttgcgatgacgagtccggtcttgacctcgttgccgctgcggtcatagtccgtaatgccattgataaacatcaggagtcctccttttgcagagcgtccaccagggcgtcgaagtcgccggacttgatcttgctggcgctgtcgtagccgtgggagcgcaggaagtccttggcctcctgtttggtaaatccgtggcggctggcgcaggtgtagaagaacttgacctgggcgggggtaatgggcttttccgggtctttgtccgcgaagtaggccccggcatcctctgtgtcgctctcaatgtcctgagtgaagctgtcggacatgcatcccagggacagggcggcggacaccagggcccgcttctgtgccatcttcagggcgctgttggcgccgtcgtagggggactggctgccggtgcggccctcccgggtgttggcggagccgtaggagctggtaatgatgtactctttgccatccacgatcttcaccaggtcacagcggacggcatagaagaagaatccagtctcctggttttcgatcttgctctccatgtggtatcgctggcagaggccgtaggctacagcaactttttcggcgcctgccttgaacagggtggggtgcttcgtcatggcctccccgttcttcttgcggatcacgccgaagtcgatgccacggcgtagggtctccggctggcagccaaacacggagatttcatagtccccggtatggggcttgcgctgcaccgtcaggggcgcggcgttatagctgtagagcattatttcttcactcatgcgtggttcttcctttccactgcctgattcatgaacagacagattttcagcagttccaggtcatagcggacttccgtgagctcataggtcccatccttggagagtttcagagcatagagataatccggggtactatgccatgggggcatcaattcttggtaggctgtcagctgggcccggagagatgggccgtggagttggccagtcttgatgtccaggatacagctgcggccatcatagagcgtcccgtatcggtccagcgttcctgcgtaaccaaattccagattccccatggggtgctcgatcagctcccagtccgggcggtagtctttcaggaagcggcggtaggctttcagatacccggcgatctccggcgtttcctccggtgtctcgccatagtcgatcagggcgcaggcttcatggacggcggtcccccggcgggcggcggtctccgccagccacggcttatccgatttgtagtcgtatgccagaaagcggcagatgtgggtaacgctggggagttccacgccgtccagggtataggtatgggacttttcatcaaactggatcaccggaactcgctcctttccttgatgctgcggccgtccagccactcgtccagctggtcctcttcctcttcccggagagtgtcggcgaagccccggaaacgggatagaagggagcggcggcaggatttgcagaggatgaccccagcgggcatatagtctttgcagatggggcagacggcggcgtcctcgatataggactggccgcagacgggacacagctcctcccggtagcggtagccggggaatacggtggggtccgtgccctcccggaccataggggcgtcaaagtaggcattgcagatttggcagtgcttcatgactcgcccccgatccggaacgcatcttccgcgggaatacccatgagacgagccacactgtcccggaatggcttggaggcagccaaccgcccggagagcatctggtatgcctgggcgtatgagacgctgcccacgtcctgaatgaagctcttgaccacgccgccatagttttctacaatgtaccttcggatgaccggatacagcacggacgggggccggggcgggattcggatgcaggccgataggtcattcttgatggtgcagtccgcgtatccgatttcccgggcgatctcctgccagttgtggccgtcgatccgcatcgtgaatgccttgatacgtttttctcttgtcaaatagctccctcctcgatgaaatagattgtagcggtacggactccggcctggatggcggcctcgtggctctccatgcagaggtcgatgtgggcgcctttcacggcgcttccggtatcgtccgcccggtaatagtggagttctccgtctccgtagtccaccaggacatcagaacccaatgggatgatggacgggtccacggccacagagacgccgggcgtggcccttctgccgctggcggtgatgccgtcggacttgccgcagcagcgggagcaggtgcagtagtgggtgacggtgacatcatccaggcggacggcatgggacagcagcgccgcctcgatcagctcgttttccgcggcctcctgctcctcttcggtgagataacagcggaccagggccggggtatcgtcgccgggtaggctgccgtcctgcgtggcgggctccggcttgtgcatggcgggccgatctgctttcaccgtcataatcaggtagcttcccagccacgccagcagcaagatcagaaataggagatatgtaatcagctgccgcctctggctccggcgccgccgctcttcgcgggtcagctttttcataggatatgcctcaccgcttcttctcgggtaatatagaaatggatgcccgtgctgcactcgttccagcggttttcgtcgaaatccgaaacggagaccacagttccgggaatgtaatggaagttctcatctctatcactgacggcgacctgctccaatacaatcccctctaaatcctgaatctccaaaacggttgcctttgagcagcggcacttccggcctgttccggaactgcgcacggcatcttcggtaatttccagctttacaatgcactcatgaccgctggttttgacccttgcctttttccagccgacaaaagcgccgatttccgggcaggcaatgggataaaataaattttttgccttttcaatgtagtcggccctggacaggtcggccctggacaggttggccccgaacaggttggccctggacaggttggccccggacaggtcggccccggacaggtcggccctggacaggttggccccgaacaggttggccctggacaggttggccccggacaggtcggccccggacaggtcggccccggacaggtcggccctggacaggttggccccgaacaggttggccccgaacaggttggccccgaacaggttggccccgaacaggtcggccctggacaggtcggccctggacaggtcggccctggacaggttggccccgaacaggttggccctggacaggttggccccggacaggtcggccccggacaggtcggccctggacaggttggccccgaacaggttggccccgaacaggttggccctggacaggttggccccggacaggtcggccctggacaggttggccccgaacaggttggcccgttttccgccattttcgcctcgtagccatttaaagtgcttgtccaaaatatttttcaactcttgttcgtccatgcgttattcctccttgtaggtctcccggaagctgccttcggggaaatcgaactccacggtgaaatgatggtgccgctcgttgatggagactacccggcagggatgcgggcctgtccttgcggtcacaaaggcgctggtggggatggtgggttccaggcacagcttgtctccaatgttcatctgtggccctccagtctgtccagtatccagaagagaccgtttgtcagggagatggctccagcggtcagaacgatgatttgaaggatcatttcgacacctccgaaagactccgggccagggtggcggcggagattttggagccgttgaaggggaagcggttcttcaaagtgctgtatttcttgatgccggtgaatcgccggacatcctccagggacagcaggtgccgcccttcggtgaattctagaatgtccgcgaggttgtcgcggtagtatcttgactcagacattcgggtcctccttttcttgatggtcgtggttgctgttcgggtctgacgggcgaaggcgcagagcctcgtcaaaggtcatgccgtaggccgcccggttgagcttgtccatgagccgcttggtgttgcgtgcctgggactccaggtctttgatggtgctgttttcgttcaaagtaaattcctccttgcgattgatttccgcccggaggaatggtatactgtcctcgcgggcctgttggcgctttcaataggttccgcagccctcgtcggtggtgtcagcactggcgggggcattttgttattcaatctgagtaaaatccgttctctttttgcagaaaaagcaatacatggttttcctgtgcccaggcaaggtggcgcctctatgtctcatttttgtggccggagtgattgccccgcagacatcgcattgaaagaggcgcttttggcacgtttgctctcgaatccttttcattgaaattttcagatcgtcatatctcctatctgtttatattgccgattttattgatatgtggtatcctgataacaaggagtgtgttgccgcatgatgacttccgaacaagcggaaatgctgcgaaggaccatccagggcgtccggttttctgacttaacagaacgtgaagcggacatgctgcggtggctgatggcaaagccaagggatattgctccgcagatgtgcagagagacctggaagccatctttgccacgcaggacggcctttgcgcccttgccacttatgaccatgagaagatcatggaaaagcggaagaagctggaccgctggtatcaagtcctcttactggtgatcggcgccttgatcgggcagcttgtggagctgctcttttccgccctgctctgaggccctgtagacttgggccagatttcgcagatacagagaccagaacttatcaaatcgggctgtgtcatagccgctttccgtttcgggaatgatcccggcgtcgatggcggccagaagggcacagcccttttcgtttgcaaatacaggtgtttccatacggacctcctttttagctggcgtactcatcaccgtcctctgcgaataggtattcaaacttcttcccgaaatactggcagtaggcacggcactctgcgggagtgaagcgtcctgactttgttttgctctgataggcggttcggctgactccgatgatccttgccatatcctcttctgtcagcttatgcagggctttctgccccaggagattagggaacatatttcacgcttctttcactgtttgcgttccgaaaactctagttatatgatagtctcgatttgcaaacttgtcaagagatattggcaaaaaagtttgcgttccgaaaacttatcattgacatttgcaaaatgcaaacttataatgaagctgaggaggcgataatgtgacttttggtgagagattaaaagagttccgggaaagctgcggttatacacaagaggaactcgctgaaatggtcggcgttgcaaagaccacgatcactggttatgaaaaagggaatcggaagccggatgtccccaaaataaaaaagctggcacatgctcttggcattacaggcgatcagcttttggggactggattagatataaataaagccccgctctattcgagcgaggcgatgcggctggcgaaagactatgacgggctggaccgctggggcaagcaggcgctccggcatgtagcggatgtagagatggcccggatggaagatgaagagagatttctgcgggatgcaggcgaatcggaggaagaaaagccaacaatcccaaacttctggtcggagcctgcggccggtatggcctcccccatcatgggcgaggattacgatgaatacaccttgcagccaggagacccgaagggcgccgttttctctgtgcggatcagcggcaacagcatggagccgtatttcccgaatgggagcagggtcttttgcaataaggacccgctgcgagatggtgatattggcgtgttctccgtggacggtgaagcggtcattaagcaataccactatgaccggattctggggatcacctatttgttttccctgaaccgggagagagcggacgcggatgtggtgattacccgcaacagcgggcagatgttggtctgcctggggcgcgtcattacgaagcggcgattcccgttgccgggaatgtaaaaagaaagaccgtccgggcgttgacgcacccggacggcaatgcaaccaaccagcaaccacgacgaagccaggaggtctgttcacagtatagcacagacctcctgatgaagcaataggaggaaaagaagatggcgaagaaaagcaagtatcatcagaggccggacgggctattcgaggcgatccggaccatcaacggaaagcgggtggcattccggggaaagagctgccgggaggtggacagaaaaatcctggaataccaggagcagaaagagcgtgggcgggacttcccaaagatcgcggacgagtgggaggtgcagcatgaaggggatattggagaatccacgcggcgggtttactcctacgccgtgaagcggctgaaagaggcgtttcccggacctgcgaaggagatacggcccctggacatccagcggtatatctccgcctttgagaagcaggggaggagcgccaacagcgtttctattgaattgtgtgtctgcaagatgatattcgcccatgcggtgatctccggagatattgatatttccccggctgcggagatcaagaagagccgggggctgcctgtgaagcaccgggaggcgctgaccgaagagcaggaggccgccgtaaaggcagcggggcgggagaagaaagcccactggtggctgtttccgtatctactgctttatactgggatgcggcggggagaagccctggcgctgacctatgcggacattgaccggaaagccggagtcatccatgtgaccaaaaaactaaactacgcctacagtaccacaccgacactcgaaaaccacttgaaaagcgagaacggcagacgggacattccgttgctgcagccgctggcggacgcgctgcccaaaaccagagcggggctgatcttcccaggcagagacggaggatttatgaaacaaggggagatcgctaaaaactggcggaggtactgccaggatgtggggctgaatgaaatcgtccagaccagcgacgggaaaatccatgagacattcccaatcacgccccactgtttccgccacagcttcgccacgatctgttatgaggcggggcttgacccccggcaggctgcggagatactgggagacacaccggaggttctggagagcgtttacacccatctgcgacaagagcacaaggcaactgcggcccagctgctgggagcttacatggacgccagagatggatagttttccacatagttttccactgtgaacgttatgcgccgctaactgtgaatttactgtgaatttcaggggtaatttacagtaacataaggtaacttaatcggatgccgcgaaaagctagagccgcaagggaaagacagtgatttcagccgttggatgaaattcgatgaaattaaacagtctgtaaaaacaaatttgcggcgtttacacatcttttcatttgtggtatactgcattcgtcaaattctgcgccggaggaaatggaaacgcccatgtggaaccgactgaaagccattctggcagacttcatccagcaggccgacctggtgctgctggggctctgctgcgccgccaccctgtacggcatggcgctgatcgccagcgccacccggtatctgaacatcggcggcatcgtgcgatatgtgggcgtccagggggcggccatggtgctgggcatctgcgcctatatcttcatgtccatgttggacctggagcggctgatgcgacggtggaagtggcttgtggccttcaacgtcgtgttcatcgccctgctgctgacaccttttggcgtctcggacaacacgggcaacaccgcatggctgaaatttccctttctccccttcagcatcggcccggcggaggtggtgaagatcaccttcaccctgctgctggccaagcagttggagtggctgcgggaggtgaagcgggatctgaaatccttcccctccgccctgatggtggcggggcacaccatcgccctgatggggtggtacgtggggatttccggggatatgggcaacggcctgacatttttcttcatctttctgtgcatggcctttgtggcaggcttcgctctgcggtggttcgtcctgctgttcgccggcagcggggcagccattgccgcctcggtggctctgggcctgatgccggactatatgatcaaccgtttccgggtcctgtttgaccactcctatgataccctgggagcaggctggcagcagacccggggcctgctggccctgggctccggcggcctcttcggccagggatacatgcagggcacccagactcaggcgggggaggggtccctgccggcccggcacacggacttcatcttctgtgtctgcggggaggagctggggatgatcggctgtcttgttgtgatcgccctgctggcggccatcatcatccgggtgctgctggtagcccgccgggctgagacgcccttccactgctatgtctgtgtgggtgtggcggccatgctgatcttccagactgtggtgaacatcggtatgtgcctgtttgtgatgcccgtgatcggtctgaccctgccgttcttcagctacggcgggtcctcgctgttgacgctgtatgccgccatgggcgtggtgtccggcatcaaaaagcgatcccctgtggtccgccgtccgggcaggcccctggggtgagcggaaggagctcccaaacacggccggagtgcgctccggccgtgtttttctgcatatttccggcgggcgggaagaaactagcggtgcacccaattcaatacaggaggtatgatcgccttgaagacccaactgatgaaacgcgccgccgccctgtgcctggcggtagtcctgaccctgtccgtcaacgccgccgccctgttcggcggcaaggagaaggcccagccggcagaggggagccccacggcccaggcgctggagatccgcacctaccggggcattccctatcacgcccagtttctggccgcgggcggcgagggagaggacctgaccttcaccgtggagaaagagcccaaaaagggcaccgtccagattgacggcgccagcttcacctataccccagagggggattccaccggaagcgacagcttcacctataccgccaccgacagcgccggacgcgtgtctcaacccgctacggtgagcgtcaccattgagaaggccaagtctggcgtcacctatgcggacacggcggacagcaccgccgcggtggccgcgcaggacctggcggaggcggggattttcaccggtgccaagatcggagaccagtactactttgagccggataagcccgtctcccgcagcgagtttctggccctggtaatggagaccgccggggacgaacccaccgccgttaccatgaccggcttctgtgatgacgcggccatccccacctgggccaaggcctacgccgcggccggcgtcgcggacggcatcattcagggcgtctccacagcggagggcgtggccttccagggagatgagcccatcaccttcaatgaggcggctaccgtgctcaaccgcgtcctggcggtggaggatgtggatctggccagctggtacgcagaccgggaggcagtgccctcctgggcagcccaggccgtggggaacatggaggcggtcagcgtcctcgccgcgggcagcttcggcagcgccgccatgggagagaccgtcacccgggcggacgcggcccagatgctctccgccgccggcaccctgctggagggagaaccggccggcctcttcgactggctcctctgagccggaaatttccagcagaacaaacagccctccgaaaaagcgcccgtgctttttcggagggcctgcggcgttttaacagttgtatttgggggcggtttgtgctaaactatggaacattaaaataggatgattatgactacccatcggagagcagtcaagatagaagggactggaaacgagcatgaagatcgttgtattggcgggggaatctccacagagcgggcggtctccctggtgacgggcaccggcgtgtgccgcgccctgcgggaaaacggccatcgggccatcctggtggatctgttcctggggctggaggaggtcccggcggacctggagaccctgtttgacgcgcccgacggcctgtgccccgacgcgaagatcgaggtggaggcgccggacctggagacggtgaagcgcggccggaaggatcagggccccagccacatcggcccccacgtgctggacatctgccagaaggcggacctggtgttcctgggcctccacggtatggacggggaggacggccgcatccaggccgccctggatttactgggcgtgccctacaccggcgcgggtcatctggcctccgctgtcgccatggacaaggcggtttccaagcagattctggacgcgtgcggcatccccacccccaagtggcggctgctgtcctatggactggatgaggcggagcccctggcccagacgctgcctatgccctgcgtcatcaagaccatcgggggcggttcgtccctgggggtgtacttaccggaggaccggacggagctgaagcgggccctggaggaggtgctgcgctacggcgccaaggtcctggcggaggagcggatctacggccgggagctgacagtggcggtcctgggggaccgctggctgccggcggtggagaccgtgcccgccggaaaggaatttgactacgtggccaagtaccaggccggcgcggcggtggagacctgtccggccgatgtgccgcccgcggtgatgcaggccgccggtgagctggccctgcggacccaccgggcgttgggattggaggtctactcccgcacggacatgattctggacaaagacggaaatctgtgggtgctggaggccaactccctgccgggcatgacccccaacagctttgtccccaaggaggccgccgccgtgggcatgagctacaaccagctctgcgaggagatcgtgcggctctcctgcgacgtgaagagaagagggtgaactgcatgcagccaatgaccattcctgagatcatatccgctgtggacggcacctggctgaatccccggaagggggcggcccccgtcaccgctgtgtgcaccgacagccggaagattgcccccggctgcctgttcctgccctgggtgggggagcggttcgacggccatgacttcatcgacagggccctggacgcgggagccgccgggtgcttgtgcgcccggaggccggagctgctgcggccagacaagttctatatccaggtggcggacacccggctggccctgcgggccctggcgtccgcctaccgggaccggttcgccatcccctttgtccaggtcaccggcagcgtgggcaagaccaccacaaaggagatgctggcggcggtgctgggggcgaagctccgggtgctgaagacaccggagaacttcaacaacgacatcggcacgcccctgaccctgctgggcctggggccggagcatcaggcggcggtgatcgagaccgggatgaaccacttcggggagatccgctatttgggggagatggtgcggccggacatcgccgtcatctccaacatcggtgacgcccatatcgagcatctgggcagccgggaggggatcctcaaggccaagagcgagatttttgagaacctgaagccggagggactggcggtccttaacggggatgacgccctgctgaacaccctggacctgcccttccggaccgtccgctgcggacggtcggagcactgcgccgtccgggtgatggacatggccgaccacggcgtggcgggaattacctgcaccgtcgtgtccccccgggacacctatcacctgaccatccctgcgccgggagagcacatggcctactctgccgccatcgccgtggcggtgggagaggagctgggcctttccacggaggagatcacccggggcgcggcttcgtatgaacccgccggatcccggatgcgggtgcttcgtctgcgggacgggcggctggtgctggatgactgctacaacgccaatccccagtccgtcactgcggccctggagatcctggccaagactgagtgcggccggaaggtggccgtgctgggggacatgggggaactgggggacctgacggaccaggcccactacaacatgggcgccctggccgccatgctgggcatcgacgaggtggtggccatcggcgccaaggcggagaagatcgccgacggcgccgcccagagcggcggctccgtcacccattttgccaccaaggaggaggccgtccacgaattgactgaccagctgggcaccgacactgccatgctggtgaaggcgtcccacgccatgcactttggctggatcgtggagcagttgaaacaagcgtatgattgagattcaagtgaacaacctggtgaagtcctttgaggtggggaagaacgtcctggacggcctcacctttcaggtggaccagggggagcgggtggggctgctgggccgcaacggcgcgggcaagaccaccctgttcaagatactgaccggcgagctggactacgacgagggcaccgtcgtggtgggccagggccggcgggtgggcctgatctcccagatccccgtctaccccgccggctgcacagtagaggatgtgctgcgctccgccttcgcccggctggagagcctggcggaggagatgcgggccctggaggcccggatggccgccggggagagcgaccctgccattttgaagcggtacggcacattaagcgagcggtttgaggcatttggcggctatgacacagatgtggcggtgaataagatcgccaacggcctgtccattccggacagccagcggtcccagctgttcgacagcctctccggcggggaaaagacccgggtgaacctgggccgcctcatcctggaggacacggacatcctgctgctggacgagcccaccaaccacttggacctccacgctaccgagtggctggaggagtacattcgctctttccacggcacggtggtcaccatctcccacgaccggtatttcctggaccgcaccgtcacccgggtcatcgagatccaggacgggaaagcggagttttacagcgggaattacagcttctacgccgtggagaaggaacgccgctaccaggagcggatgaagcagtacgaaaaagagcaggccaagatcgcacagttggagaaggcggcggagcaattgcgggtctgggctttcatgggcatggacaagacctaccgccgggccatctccatggaaaagcgcatcgagcggatgcggaccacctccaaacccaccaaggcgcggaagatggacgcccggttctcctccgcagagttccacggggacgaggtgctgggcatccggaacgtgtccaagtcctacggggacaagcacctctttgagggcatcagcctgaaggtggaggggggcgagcgcatcgccctcatcggcgacaacggcaccggaaagtccacccttatcaagatgatcgtgggggagctgtatccggacgacggccgcatcaaaaccggcccccaggtgaaggaggcatacctgccccagatcgtccgcttcgaccacccagactggaacctggtggagaatatgatggcggcgaaaaagggcctctcggcccagtcggcccgaaaccggctggcggcatacgacttccggggcgaggacgtgttcaagccggtgtcggtgctctccggcggggagcagagccgcctgcggctgtgcatgctgatggatgacgagatcaacttcctgatcctggacgagcccaccaaccatctggacatcgactcccgggagtggatcgaggaggcggtggaggcctacgacggcacgctgctgtttgtcagccatgaccggtacttcatcaaccgcttcgccacccggatctgggagctgacggatggcaccatcacggattatccctgcggctttgcccaataccggcagatgaaggctcaggaggaggcggagaaggccgccgctcccaagccggagaaggagcgggaaaagcccgctgcggagcggccccagcggggcaacaaggctcagcaggcggcccgacggcagctgaccatctgtgagcgggacatcgccaaggcggaggagcgcatcgccgctctggaggcagatatggaggccgcggcctgcgactatgagaagctgaacgagctggtggggcagaaggacgccgcccaggcggagctggacgccctgtacgaaaggtgggagcagctcagtgaagaggcagagggctaaacagcggcccctgtaccggtacgatgtctaccggggccgcagaagaggacaggcccggctgatcggggcggcgggctgcgccgttttcggcctgcttctggtgctgatccggagcctgggcatccggttttccggctttctgctgctggggctggcggcgctcctggtgctttcctggctgctggatcgcctggccgccggaaatcaccgctggcggctgatccgccggggcttttatggctgccttacggtgggactggctgcgctgctggggctggaggtctttatcattaaccgggggcgcagcgacatgacgcccctgccggcagacgcggtcatcgtcctgggagcgggggtcaacggcacggagccgtcgttgtccctgcggacccggctggacgcggccctggactatctggaggcccacccggagatcccggtggtgctcaccggcggcaccggctatggcgaggagatcagcgaggcggcgtgcatgtacgactacctcacggcccatggcgtggagccggggcggctgattctggaggatcaggcatccaacacggcggagaacttcgccctctccaagcccctgctgtatgaggcgggggtcgacccagcggagggacgggtggctgttgtcaccaacgactttcacatcgcccggtcggagctgatcgccgcccgggagggctacggagacgtggccgggatcccagcgccgctgccctgggttcatttggagatcaattacaccctgcgggaggcctttgccatggtaaagacctttctgtttgactgagcggatacggaggaaccaaatgagcgatatcttatgtatctattactcccggacggggaacaccaagaaggccatggaggagattgccgccgccctggacgcggagctggcggagctgcgggacaacgcggaccggagcggctggcggggctggctgcgctgtgggctggacgccatgcgcaaagacacccgccccgtggccccgttggagacagcccgtcccctgggggactaccgcttggtgattctgggcacaccggtgtgggccgggcgatccagcgccgtcatgcggtcgtttctgaaagaccggggcggggagatccgcaacgcggcctatgtgctgacccgcagcagcggctcccagtaccaggaggtttatcgccagatggatctctgtgtgcccgccggtcatctggcggcggtgtccttgcggagcggggacgtgggctgggcattctggcaggaggagtttctccgccaggtccgggcctttctggaggggcagtagcggcagacccttttctgaaatcaacgggagaggagatgccccatgcaggaaaaactgaaggagctggccctgcggtatgaggacctgcaagcccagctggcagacccgtctgtctatggcgacgcggagcggctgaagactgtgaatcgggagctgaaggacctgactccggtggcagaggcgtaccaggcataccggcaggcggaggcggaccgagccgcggcggaggagctgctctccgacccggagatgcgggagttggcccaggaggagctgaccgccgcacgggaagagatggagcggctacggcaggagctgaagctcctgctgctgcccaaggatcccaatgaccggaagaacgtgatcctggagatccgggcgggtaccggcggcgaggaggcggcgctgttcgccgcgtcgctgctgcggatgtacaccatgtacgctgccgcccggggctggaggactgacaccgtggagctgaacgagacggagctggggggcgtgaaggagtgcagcgtccttatcgagggcgagggcgcctggtcccggctgaaattcgagagcggcgtccaccgggtccagcgggtgccggtgacggagtccaatggccgcatccagacctccgccgccacggtggccgtgctgccggaggcggaaggggtggacgtgaagctggaccctgcggacatcgagatgcaggtctaccgggccagcggcgcgggtggccagcatgtgaacaagacgtcctccgccgtgcggctgatccaccggcccaccggcctggtagtggaatgccagcaggagcgcagccagttccagaaccgggacaaggccatgcgccttttggcgtcaagattgtatgagatcgagcgggaaaagcaggatgccgacatcgccagagagcggaagagtcaggtgggcagcggcgaccgcagcgagaagatccgcacctacaacttcccccagggccgggtgacggatcaccggatcggcctgacgctgtaccggatcgacgcagtcctggacggggaactggatgagctcatcgacgccctggtgaccgccgaccaggcggagaagctgaagaacggcggcggggaaccataaaacagagctgtacggcggcccggatagagcggcgccgtggaggggctgcacttccggcagcctgccgggacgccgcggagccctttggagacgcagaaagagtaagcaataaggccggggagatctccggcgaagagagatagaggcgaagagatatgcagacacgatattttgacctgcgggacaccaagggtcagcagaaggagatcgaggacaagatcggcgcagcggccaagatcctgcgggacggcggcctggtgggcatccccacggagacggtgtacggcttgggggccaacgctctggacggcaccgcggtgaagcggatctttgaggccaagggccggccccaggacaatcccctcatcatccatgtgaccggcgcccagtggctgccccgctactgcgccgacgtgccgcccctggcctatgtgctggcccggaaattctggcccggccccctgactatgatcctgaagcggcggcccatcatcccggacgagaccaccgccgggctggacacggtggcggtgcgctgccccaaccacccggtgacgctggcgatcatccgggaggcgggcatccccatcgcggcccccagcgccaacctctccggccggcccagctgcacgactgcccaggacgtgctggaggatatggacggccggatcagcggcgtggtggacggcggtccctgtgcggtgggtgtggagtccacgattctggacctgacctgcgacccgcccaggctgctgcgtcccggcggactgcccctggaggacctggagcggctcatcggcaagatcgacgtggataaggccgtcaacggcgccctggcggagggcgagaagcccaaagcccccggcatgaagtaccgccactacgcccccaaggcgccggtcaccgtcatcaccggcgcgccggagaagtccgcccaggagatcctgcggcgggtggggcccacttccggcgtcatctgcttcgaggagtttgcggatctgttccgggagcaggaggtccacaccctggggcctgtaggcgacaagctggtccaggcccagcgggtgttcgacgccctgcggacctttgacaccagcgatgtgacggagatcttcgcccagtgcccggacaaccggggattgggtctggccatcggcaaccggctgaaaaaggccgccggcttccatgtggtggaggcggacagtgagcgggtggtgctgggcctcaccggcggcaccggcgcgggcaagtccagcgccctgcgggccatccgctccctggggggcgaggtcatcgactgcgacgccctgtaccatgagatgctggagacctgcgctcccctgcgggatgagatcggtgtctccttccccggcgcgtttgacgcagccggccaactggaccggcgcaagctgggacaggaggtcttctcccacaaggaccggctggagcagctcaacggcattgtggcccgccatctggtgccggaggtgcggcggcgcttggcggcgtcggagagcaagatcttcgccatcgatgccatcaacctgctggagggcgggctggaccagctgtgcgaccggacgatagccgtcaccgcgcctttggaactgcgggtccggcggatcatggcccgggacaacatcacagagcagtacgcccgcctgcggatctccgcccagcagccggacgagtactaccggggcaagtgcgactgtgagctgaataacgccgccgataccgccgcggcctttgaaatggaggcccgggagtttttccagcggctgatcgacaccatcaaggaggaaaaagcacatggaaagcaaggaatttaaggcgctgaaggagcagctgctctcctgccgccgcaacggcttcgaccggatggacgcggcggagcggagcgccatggaatcgtactgcacggactacaaggcatttctggacactagcaagaccgagcggctctgcgcaggagaggttgtccgcctggcagagcaggccggctaccggccctatgtccggggcgcggcggtgaagccgggagacaaggtttatctctgtaaccggggcaagagcgtgctgctggcccacatcggggagaagccgttggcggagggtgttcagatcgctgccgcccacatagactcccccggctggacctgaagcccaaccccctgtatgaggacggggaactggcctatttcaagacccactattacggcggtatccgcaagtaccagtgggttaccattcccctggagctccacggcgtggtggccctgcgggacggcgccagcgtacaggtgaacatcggcgggggcgcggacgatccccggctggtgatcacggacctgctgccccacctgggcgcggagcagaacaagaagccgctggcggaggccatccccgctgagaccctgaacctgctgctgggcagcgagccgatcggggacgcggaggagtccggccgtgtgaagctggcggtgatgaagctgctgaacgaaaagtacggcatcacagaggatgacttcacctccgcggagctggaggcggtgccggcggtaaaggccacggacatcggcctggatcgcagcatgatcggcgcctacggccatgatgaccgggtgtgtgcctacgccgccctgcgggccctgctggatctggaggggacccctgccaagacggcggtgtgcgttctggcggataaggaggagatcggctccgacggtgtgacgggcatgcagtccgccgctttcgacacatttatggaggacctgtgcgagagccagggcgcggctgtgcgggtgtgtttcgagaagtccttctgcctcagcgccgacgtgacggcggcctacgaccctaacttctccgacgtgtatgagaagcgcaacgccgcctatctgaactacggcatcggcctgtgcaagtacaccggcgcccggggcaagtctggtgcctccgacgcggacgcggagacggtggcctatatccgcaacctctttgacgaggcgggggtcatctggcagatcgcagagctgggcaaggtggacgccggcggcggcggcactgtggccatgtatatggccaaccggaacatcaccacgctggacgcgggcgtgccggtcctgtccatgcacgcgccctttgagacggtgtccaagctggactgctacgagacctataagggcatgaaggccgtattccaggcggagaagtgaatcggctgagatcaggaaacaggcgccccggtgaaaaccggggcgcctgtttctatccggcattctgctcaggtgagggggagaaaaccgggggaacttttcctgttttcgtcaaaagaatttcggcgaatttggttgcattgcctacggaaatatggtaagatgctttgcgtgtaaagacaaatggccataggaggcggacgagatggcgagagagatcaagtattacattgtggccgcgaacgccctgccggagatcttcgtgaaggtggcggaggccaagcggatgatgcagaccggcgaggcggacaccgtgggcgctgccacgaagcaggtggggatcagccgcagcgcgttctacaagtacaaggatgcggtgcagccgttcaacgatatgaaggcggagcacatcatcaccttttactgtatgctcaaggacaacaccggcgtgctctccagcgtgctgtccgtgtttgccacttctggggccaacatcctcaccatcaaccagagcattcccaccaacggctgcgcggcggtgacgatttccgcagagaccagcggactggcggagaccctggagaagctgatggcagacgtggccgccgtggacggcgtggtacgggtggaagtcctggcaggataaagagagaggaaacggacgcatgatacagattgcgattatgggccttggtacggtgggcaccggcgtggccaaggtagtggcggaaaacgcccggcagatcgagcgaaagctgggcgagcccctgcaggtgaagaccattctggtgcggcatttcaaggacgggccctaccgtcagctgatgacggatgacttcacgaagatcgaggaggaccatgctatccgggtggtggtggagaccatcggcggcgtggaggcggcctacgagtacacgaagcgggccctgaacgccggcaagcacgtggtcaccgccaacaagcagctggtggcggagaagggcgcagagctgctggccctggccaaaaagcggggcgtgaactatttgttcgaggccagcgtgggcggcggtatcccagtgctgcatcccctgacccagtgcatggctgccaaccggatcgacgaggtgtacggcatcctaaacggcaccaccaattatatccttacccggatggtccgggccggcaccacctttgcagacgccctgaaagaggcgcaggagaagggctatgcggaggcagaccccaccgcagacgtggagggcgtcgacgccgggcggaagatctgtatcctggcggatctggccttcggctgtcaggtggacccggcggatgtgcccatggaggggatcagccggctgtctctccgggacgtgaagatcgcccagcgggcgggctaccgcgtcaagctgctgggccgggcggtgcgcctgcccggcggccgtaccgcctatgtggcaccccatctgatcccggaggagcagcccctggccagcgtggacgatgtgttcaacgcggtggtggtccggggaaacgccaccggggaagtgatgttctacggccagggggccggggagctgcccacggcctccgcctgcgtggcggacgtgatggaggcgcttcagtccagcccccgccgggaggagatcggctgggaggcggacccggcgggctttgaggacccgcaggcccttcggagccggtactacttccgcatcggcggcagcctcagcgccgctgccgcggccttcggccaggtggagatcctcagcgaggacggcggtgagaccgccttcctcaccgactgcatcagcggagccgaggcagggaagcaggccgaaggcctgcgcgtcctggcctgtctgcgggtgctgggataagccccaaaccgccggaagatgtgtatactggaacaggcgggaaccgggatttgagacttgattctgatttaaagaaggaaatgccatgagcttgatcgtacagaaattcggcggcaccagcgtgagagatgccaagcgcatccgcaacgtagccggcatcatcgcagagacctatctggcggggaacgacgtgattgtggtcctctccgcccagggagacactacagacgatctcattgccaaggcggaggagatcaacccccacgcctccaagcgggagatggatatgctgctctccacgggagagcaaatctctgtggccctgtgcgccatggccctggaggccatgggcctgccctgcatatccctggctgcttggcaggtggggatacagtctacctccgtccactccgacgcccggatcaagaagatcgacaccgagcgtatccagtccgagctggaccagcaccggatcgtgatcgtcaccggcttccagggcgtggaccgcaacggggacgtgaccaccctgggccggggcgggtccgacaccagcgccgtggcgctggcggcggccttccgtgcagatctgtgccagatctacacggatgtggacggtgtgtataccacggacccccgcatcgtccccagtgcccgcaaactggatgagatcacctacgacgagatgctggaactggcgtcgcagggggcccaggtgctccacaaccgcagcgtggagctggccaagaagttcagagtgaatttggaagtcgtgtccagcctggagcgcaagcccggcacgaaagtcaaggaggtcaccaaagtggagaaaaccaatatcgccggtgtcgccaaggacaccagcatcgcccgcgtcgccctgatcggtctgcagcacaacccaggcgtcgcattccaggtctttgacctgctgagcaagcacaacatcaacgtggatgtcatcctgcagtccattggccgggaggacaccaaggacatcaccttcacggtccacaagaaggacctggaggaatccaagcagattctggaggaacataaagagaccctgaggttcgaccacattgagacggatgagagcatcggcaaggtctccattgtgggcgcgggcctcatgagcaactgcggcgtggccgcccggatgttcgaggccctctatgaggcgggcatcaacatccagatgatcaatacttctgagatccgagtctccgttctgctggatgaggaggacgtgaaccgggcggtccgggccatccacgacaagttcttcggcgagatctgattccgcctggagcatcagcccagcagggcgcgcccaccggcgcgccctgtgctgttttccggtctgctccgccgccgcgctgcatacagtggagcgaggtgaggcgaaccatgagagatcccttcaatcgttttgccctgcggtatctggcggctgtggtgtgcggcctggcactgctgctgctccacagcacggcacaaagcggactgcctgccgcgttcgtgccccagtgtcccagcccctgggagttgagcaagctggccttctggccgctgcttgccgcctgggtgctgaccggccggctgggcagggagcgccgcacgctgctgcaggatctgccggcagcggtgctgacgcccctggctatgacagcggcgtgctggggcttggcggccgccgggggaaacggcgcggcgagcctggcggtctgggcggtgctgctggcggcgggcacggccttctgcccggacggaagaaagcacccggggctgtgggcagccctggctctgcttctggcggggctgtacatgctgctgaccttcacgcctccgggctggggaccattcgtcaatccgctgggatgagagaggatttactttcccgcccatctgtggtacaatacggacgctgtatacaagagaatgccgcctcgccgggcttgccggcgggcggccatgaggaggaacttcgctatgaacgccatcgtcaccgtcgtggggcaggataaggtaggcatcatcgccgccgtctgcgccctgctggctgagcacaatgtcaatatcctggacatctcccagacgatcctccagggctccttcaccatggtcatggccgtggacgtgggagcggccaaggtctccgtgggcgagctgcgggacctgctggagcagttggggcagaagatggagatctctatccgcatccagcgggaggagatatttgatgccatgcatcgcatctgacttcaagagggagctgcgcccaccctttagattccccctccccagtgagacgttggtcactggggacgccgtccccggcggctgggtcaagaaattttcggcaggtacacgccctgccgaaaatgatttaatattcttcttttgccggaggtaaaagaactgaggaaaaccggaggttttcccctagcctcttttacccgtttccggagtccttttgagagagaatttgtacgttgggagatacgttatgctgaaccagaaggaaattttatctaccattgagatgatcgaccagcagcacctggacatccgcaccatcaccatgggcatctccctgctgagctgctgtgatccggacccgaagcgggcctgtgagaagatctacgacaagatcacccggtatgcggagaagctggtcaagaccggcgaggacatcgagcgggagttcggcatccccatcgtgaacaagcgcatttccgtcactcccatggccctggtggccggggccagcgagacggaggactgcgtgccctttgccctggccctggaccgggcggcccagacctgcggcgtcaactttatcggcggctactccgccctggtgcagaagggcatgacagaggcggacgagaagctgatccgctccattccggaggctctggcccggacagaactggtctgttcctccgtcaacgtggggtccacccgggcgggcatcaatatggacgcggtggccctgatgggccgcatcgtcaaggataccgctgccgccacggcggaccgggatggcctgggctgcgccaagctggtggtgttctgcaatgccgtggaggacaacccctttatggccggcgccttccacggcgtgggagaggcggagaaggtcatcaacgtgggcgtctccggccccggcgtagtgtgtactgctttgaaagcggtgaagggccagccctttgacgtggtggcggagacagtgaagaagaccgctttccgggtgacccgcatgggccagttggtggcccaggaggccagccgtcggctggacacgcccttcggcatcgtggatctctccctggcgcctaccccggccatcggagacagcgtggcccgcattctggaggagatgggcctggaggtctgcggcacccacggcactacggcggcgctggccctgttgaacgacgcggtgaagaagggcggcgtcatggcgtcctcctctgtgggcggcctctccggcgccttcatccccgtcagcgaggacgagggcatgatcgccgccgcagaggcagggaccctctgcctggacaagctggaggccatgacctgcgtctgctccgtgggcctggacatgatcgccgtccccggcgacaccccggcagagaccatctccgccatcattgcagacgaggcggccatcggcatggtgaacaacaagaccaccgccgtccggctgctgcccgcccccggcaagaccgtgggggaccggatcgagatgggcggcctcctgggcagcgccccggtgatgccggtgcacccggagtccagcgcggactttatcgcccggggcggccgcatcccggcgcccctccacagcctgaagaactgagccagcgggccgtccggaagggcggcctgttttgccatacagatggggaaaggcgttcagatatgccgcagcttcatgtgcagcagggctcacgccttttcgcggcatactgtcctatacttggagtttcacgccggggtatgggacgcgccctgccgcggtaaactgggagaaaaggaggaatcgcatggacattctctttgaaaacggcaccatccgcactctggagcggaacagccctgatgcccaggccctgttggtgcgcaacggccggatcgccgccgtggggggcaggacggcggtggaggaccagacgggaatcgacgtccgccgggtggatctggcaggcaggacgctgctgccggcgtttctggacgcccacagccactttacggcggtggccaaccagtttctgcaggtgtctttggagggctgcacctcctgggcggacatgcaggaccggatccgggactacatccggcgggagcgcatccctgccgggcagtgggtaacggcacaggggtacgaccacaacctgctctcggagcggcgccacccggatcggctctgcctggatgcggcggcgccggacaacccggtggtgatctgccaccagtccggccacatgggcgtgttcaacaccgcggcgctggagcggctgggtgtcactgcgcagacgcctgcccccgccggaggcgtcatcggacgggagaacggcaccctcaccggctacatggaggaaaacgcctttctggagttccaaaagcgggtgcccatgaggccgctggagtcgtttctggcggcctaccggaaggcccaggacctgtacgcctcctacggaatcaccaccgtgcaggaagggctgctgcgccgggagctggtacccctgtatcaggccctgctggcggacgggtccctgaagctggatgtggttgcctacggagatccggagggagcggaggcggcccggcaggcatttccggagagtgtccggcaatatcaccggcgcttcaagctgggcgggtacaagatgtttctggatggatctccccagggacgtaccgcttggctgcggcggccctatcagggggagcaggaataccggggctacggcaccctgacggacgcagaggtgctggacatggtccgccgggccgggacagatggaatgcagctgctggcccactgcaacggggatgccgcctgcgcccagtatctggcggcgctggatgcggcggcgcgggaaggcgtggatctggcggcactgcggccggtgatgatccacgcccagctgctgggcagggaccaactgccggaggtgaggcggctgggggtgatcccctctttcttcgtggcccacgtgtaccactggggggatgtccatctggaaaatctgggacccggccgggcggaggccatcagtcccgcaggctcggcggcggagaaggggatccccttcacattccatcaggatgcgccggtgatccggcccgatatgctggagacggtgtggtgtgccgtgaaccgggtgacccggcagggccgcgtcctgggccgggaagagcgggtggacgtccggacggccctggaggcggtgacggtccacgctgcataccagtattttgaggagacggacaagggcaccctggcgccggggaagcaggcggatctggtgattctggaccgggaccccctggcggtgccgcaggaggagctccgggatattcgggtactggagacctggaaggatggcgttcccatcttctgccgggaggcatgagtctgccgccgggtggaaaagaacgcttgcaatttttcgcacgagaggtaaaataaggaggaacgacgtgcccaacgcgttggaacatgggaggtgagcaatatggagaaaaagagcaagctggtgctggccgttttacagggaagcgattccgacaacaccatccgtaacctgaatgagcgcggcttcatggtgacggtgctgagctccaccggcggctttttgaagaaaaagagcaccacggtgatgatcggcgtggaggaggatcggctggaagaggccctggacgtcctgcagaagtatgcgggacaccggaaggagaccgtgtaccagagcgtgaccatgccccacggggagatgtccgcggtgccgccggtacccatggaggtcatggccggcggtgcggcggtgttcatcgtgtcgctggacgatatccgcaaattctgaatccctgcgtctcaaatggcaaaaaagacctgcgcggcagctgccgtgcaggtcttttttgcgcatcgaagggaagctcgtcagccctgtcgggccgcctcctccgcgtcaaattttgcccggtcccggtcgatctgcttctgatagcggtccgcctcggaaaagacgcagccgcagtacttctgcatatagaaccccagctctcgggcccgctggttgccggcccggaagtttgaccggaagtcccggtagagaaattccaccccgtactgccgggcatacatctccgctgcggcggcgatggcctcgtgattctgataggtgctggccagcagggtggaggtgaaggcggtaaagccgtgctctgccgcatacttcgccgtgccctccagccggtgttcgtagcagtaggcgcagcggtggtcgatgtctcccgccacatggcggacaaagtccttcagaccgtagtcctcctgtacccggacctccataccgatggtgggggcatacgccagcaggcagtcccgccgggcctgatactccttccaggggtggatgttggggttgtaccaaaacgccaccggctcgatgccctcgctccgcagagggtcgatgcagctgagggaacaaggggcgcagcaggtgtgcagcaaaacgcgttccatgtcgaaaatgcctctctttggttctgagatggaaccagtatagcatagaagagagaaaaggccaagcccctttcccaaccaagtttcttaacgaaaaattaacagtctttcagaatattgccgattgaacatcccatggaaaaagtgtatgatgtcaactaatgtggtatcatgcggttagctgttgaaaactctgacgcaaccgttttcccagaaggaggaagcagagttgaaagttggacttgacgtaggatccaccaccatcaaatgcgtggtgctggacgatgcggataatctggtatacagtacatacgagcggcattacagccatattctggaaaagtcggaggagctgctgcgccgggtggcggatcagcacggcgcaaaagcggatctggccatctccggctctgccggcatgggcatggcggagagcgtgcaggtcccattcgtgcaggaggtgtttgccacccgcgtggcggccaacaagctggccccggggacggactgcatcatcgagctgggcggcgaggacgccaaaatcctgttcctcaccggcggcatggaggtgcggatgaacggctcctgcgccggcggcaccggcgccttcatcgaccagatggcgacgctgctgaaaatgagcgccgacgagatggacgccgccgcccagcgggcggagaagacgtacaccatcgcctcccgctgcggcgtgttcgccaagagcgatgtgcagcccctcatcaaccagggcgccaaggcggaggatatttccgccagcatctatcaggcggtggtgaaccagaccattgccgggctggcccagggccggcccatcaagggcaacgtcctgtacctgggtgggcccctgaccttctcccgagtcctgcgggagagctttgaccacaccctgggggtccagggcacctgtccggagaacagcctgctgtacgtggccctgggcgcagccttctattccgaccaggaattcgacctgaaccaggtggcggacgacctgcagaagcacggcgcggcggagacctaccgctccctgccgcccctgttcagcagccgtgaggagtatgaggcgttccggacccggcacgccaaggccacggtgccccaggtgcccttcggcgcggactacgccgccccggtgcacatcggcgtcgactccggctccactaccgtgaagctggtggtcatcgaccaggacgcccgcatcctcttctccgactaccggcccaatctgggcaacccggtgcccctcatccggcaggtgctgcaggagctctatgacgagcatccggccctccatgtggcgtccgtcaccaccaccggctacggagaggatctggcgaaaaacgccttccacgcggactacggcgtggtggagacggtggcccacttcaccgccgcccgccacttcctgcccaatgtggacttcatcatcgacatcggcggccaggacatgaaatgcttcaagatcgaggacggcgccatcagcaacatcttcctgaacgaggcatgctcctccggctgcggcagcttcctgcagaccttcgcccaggcgctggggtacgacgtgaaagagtttgcccagctgggcctgtttgccgagcggcctgtggacctgggcagccgctgcactgtgttcatgaactccagcgtgaagcaggcccagaaggacggcgccaccattgagaacatctctgccggcctctccatgtccgtggtgcgcaacgccatctacaaggtcatccgggcctcctctcccgaggagctgggccggaacatcgtggtccagggcggcaccttctacaacgaggcggtgctgcgggcttttgagaaggagatgggcgtagaggttatccggcccaatatcgctggcctcatgggcgcctacggcgccgccctgttcggccggggaaaggcccgggcggatcagaccagtacgcttttgaaccgtcaggagctggcggacttccgccaggagacggagagccgggtgtgcggcctgtgcggcaacaactgccagctgaccatcaacaccttcgccgacggggccaccttcatcagcggcaaccgctgcgaccggcccgtcaccggcaaggcggacaccggggagcggaacctctacgaatacaagcgcaagctgatcctgggctacaagcccgtccccggcaggcggggcaagatcgggctgcccctgtgcctgaatatgtgggagctgctgcccttctggcacaccttcttcaccaagctgggcttcgcggtgtaccacagccccttctccagccgggacctgtatctgaaggggcagggcaccatccccagcgacaccgcctgcttccccgccaagttggcccacggtcatattcagttcctcgcaaagcttggcctggacgcgatcttctacccctgcatgacctacaatctggatgaggggctgggggacaaccactacaactgccctgtggtggcctactatccggaggtcatcgccggcaactgcccggaggttcagcagaccaagttcatctatgactatgtgggcctccaccggcccaaggacttcaccaaaaagatcttcaccatcctgcgcagctacttcccggacatcaccaagggcgaggtgaaggaggccaccgacgccgcctacgccgagtacgcccaccacatgtccctcatccgcaaggagggagagcggatcatcgaccaggcccgggcagagggccgccggatcatcgtgttggcaggccggccctatcacgtggacccggaggtcaaccacggcatcgacactctgattacccgcgccggcgccgcggtcatcacggaggactccatctccaaccgggtggagaaattccccaccacggtgctgaaccagtggacctaccacgcccgtctctacgcggcggcccgctactgctgcacccagcgggatatggacctggtgcagctggtctccttcggctgcggcgtggacgccatcacctccgacgagacacgggagatcctgcaggcgggcggcaagctgtacacccagctgaagatcgacgagatcaccaacctgggcgctgtccgcatccggctgcggagcctgttcgctgccctggatgagcaggacgaggcccgggaaactgccagaaaggaggcgtgagacatggagctggaattccagaattaccccaagttcacccctgaaatgaaaaagacccataagatcctgattcccaacatggccccggtgcagttccgcatcctggcggccgtcatgcggcaggccggctacacctgcgagctgctggagaactgcggcagccaggtcagcgagctgggattgaaatacgtccacaacgacacctgctatcccgccctgctggtcatcggccagttcctggacgccctgggctccgggaagtacgatctggaccacaccgccctgattatcacccagactggcggcggctgccgggcctccaactacatccacctgctgcgcaaggccctggtgaaggcaggctatggccaggttccggtggtgagcctgaacttctccggattggagaaggactccggcttccccatgaccctgcccctgatgcgcaagcttctggcctgcatctactacggcgacctgctggtggccctgaaggcccagacggagccctatgagacccacaagggggacgcggccgctttgcaggagaagtggctggacaccatctgcggctgggtcatggaggacaagggctggtccggccgggagatcaaggccgccatgcccaagatcgccgcagagttcgccgccattcccgttcaccgggtacccaaggtgaaggtgggcgtggtaggggagatctacgtgaaatactccccctgggcaacaatgacctggagaagttcctggcctcccaggactgcgaggtgaacctgccgggcctgatgggctttgtgcagtactgcgcctacaacccctccgaaaccgcccggctgtatggcggcaccttcctggaaaagcatgtgtcaagcgtaatcctggactacatcgagggcatggagaaggtgatgatccgggtcctgaaggacaacggcttccacgcgcccctgcccttccgggagctggtgaagctgacggacggcgtcatctccaccggcaacaaaatgggtgagggctggctcctcaccgccgagatgatcgagctggtgcgggccgggtacgagaacatcgtctgtgcccagcccttcggctgcctgcccaaccacatctgcggcaaggggatgatcaacaagatccgggagctgtacccccaggccaacatcacccccatcgactacgatcccagcgccacccgggtgaatcaggagaaccgcatcaagctgatgctggcggtggcccgggagcggctggcggagaagactgccgaccagagtgcccgggagactccggcgcccgcagagaccccgcagagcggggcggagcctcagacagtctccgtataaacaaagccataactggaagtgccggcgcggcagacccgagagggtctgccgcgctgctgttttctggccgtgctcccagcatttgtgccttgaggcccgcagcccgttccggtaaaatagggcgtgacgacacacgcattttggtgacgattatctgaaaaaggagcgttttcccttgcgaaatttcatcagacgaaccgccgccgcgctggccgtcctgtgtatggcggccctgctgttgggtacccccacggaggcggaagagcgtacatattccgccggaggagaggcggtgggctactacgccggatgggcggcctaccagggcttcacccctgaccaaatcccggcggagcatctgactcagatcaactacgcctttgcccagatcgacccagataccctcaccattgctctggagaatccagcccatgaccaaaagaacctggccgccctgcggaagctgcgccagcagaaccagcatctcaagctgctgatctccgtgggcgggtggtcggactcccagtacttctccgacgcggtcgccacggcggcccggcgggagagcttcgctgccagctgtgtggactttgtggtggagcagggcctggacggggtggacctggactgggagtacccggtatccggcggcgcggcggggaccatccaccgcccggcggacaagcagaacttcactctgctgcttcaggagctgcgggagcagctggatcggcagggccgccgggacgggaaggactacgccctcactatcgccggcgccgccgggagctggtacttaaaccagatcgaggccgtgaaggtggccgccattgtggaccacatcttcgtgatgggctatgacctccacggcacctgggatacctacgcggacttcaacgcacccctgtatgcgccctccggcacctcgccccagagcagaagcagcatctccgattgcgtacaggcctatctgaaaaagggtatcccggcggaaaagatcgtcctggggatgcctttgtacggctatgcctaccagggggtcaaggcccagaacaacggcctgtacagcacttacacatcagccaaatccgtcagctacaagatgctgaagaagagctatctggacaacacggactaccgccagttccgccatgaagaggcgcaggtgccctggctctacggaaaccgcaccttcgtctcctacgacgatgccgtgtccctcgctgccaaggcacagctggcccggtctctgggtctgggcggcgtggggttctgggagatctcccaggacgatgggggagagctgatcgctgccgccagcggggccttccgcagcacctgggacaatcccttccgggacgtaccccccggcgcgtggtatgaagaggcggtccaatatgtgtatgaggcggggctgatgcaggggaccaccggcagcaccttttcccctgaccgggcatccaaccggggcatgatcgccgccatcctctaccgactggagggcagacccagggcggggacgcctcccttcaccgatgtggcggcggacagctactgcgccgatgcggtggcctgggcggaacagcagggaatcgtccggggctttgacgacggaaccttccgcccggaggggcggatcacccgccagcaactggcggccatcctgttccggtacacggaatacagaggagcggataccgcgggccggacggacctgagccgcttctccgacagcgccgctgtggcggactatgcccgggatgccctggcctgggcggtgtctgctggactgctccagggccggtccgacggcacgctggatccgtccggctccgccacccgggcccagacggcagtgatcctccagcggctggaaacactgctggaaaagaactgaacagagtgccgcagggccgggacacactgtcccggccctgcatgtgtcctctccttgacggaccgtcccgttccaggtatgatggaaccaacaagattggccggcagagaaggggagcgattcgatgaaggtgtgcattctgatgggcagccccagaaaacagggcaataccaacgccctgctgggccccttccggcaggagctggaagggctgggggcggagacggaaactgtatggctccatgctctggagatcaggccctgcacggcctgccgggcctgccagcgggactggacggcatttggttgcgctcagcgggacgacgtgcccatgatctttgacaaggtgctggcgtgcgacctgatcgtgttggccacgcccatctattcctggtactgcacgccgcccatgaaggcattgctggaccggctggtgtacggcatggacaagtattacggggcggaaaaaggtcccgccctgtgggcggggaaagccctggctctgctgctgacctgcggctaccgcccggagcggggctgcgacctgttcgaggaggggatgcgccggtactgcaagcacgcccagctccgttttctgggcagccacgcggagcggcacctggggtatgacgtccccttcatggacgcggagaaagaggcccgcacccgggcctttgcccgggagctgtgggatgccgtgcattgaagcacagcccctgtgagaccgccgcccggcggtctctttttctgcgcatgggcgggataaaaccgccccaaacggttgacggacacggtcccaaggcggtataataacatgatttacaatggataagagtttgtctggaggaattttggtatgtggatcgcggagcaatggcaggactatgagctgctggactgcggcgggggagagaagctggagcgctggggagagcagtacctagtgcggccggacccccaggccatctgggacagcccccggaagaaccccgcctggaagcgggccaacgcccggtatctccgcagccagtccggcggcggccactgggagaagaagaccctgccggagagctggaagatccgctaccgggacctgaccttccaggtgaagcccatgaacttcaagcacacgggcctgtttccggaacaggcggtgaactgggatttcgccatggagaagatccggaacgccgggcggcccatccgggtgctgaacctgttcgcctacaccggcggggccacggtggcctgcgccaaggcgggggccagcgtctgccacgtggacgcggccaagggcatggtggcgtgggccagggaaaacgccagactctccggcctggaagacgcccccatccgctggatcgtggacgactgcggcaagtttgtggagcgggagatccgccggggtaagacctacgacgccatcatcatggacccgcccagctacggccggggccccggcggcgaggtgtggaagctggaggacaacctctacgacttcgtgaagctctgcgccggcgtgctgtcggagcggcccctgttcgtgctcatcaactcctacaccacgggcctggccccgtcggtgctggggtatctgctgcatctgttggtgggggccaaatacggcggcaagtgcacctgggacgagctgggcctgccggtgacggagacgggcctggctctgccctgcggtgccacaggccgctggtgcagcgagtgaggccgtgggacggactgcggcatacctgctgacgctggcagcgggggcggtgcctgccctggcgctctttgggtgcctgagcccccggcgccggcggcacctcgccgccgcgggccttgccagtccggtggtccgggaggcggggatggccctcttctggatgttctgcggcggcatggccctggtgaccctgacgccccgatgggtcgtccaggccctggcgggcctgcttcagggctgcggctggaacggggaggggaatcccttcttcgctccggggactgtcaatctggttcccttccggaccctgggcgacggttacatcctggcggggaatctgatcatgttcctgccctttggctttttccccgccctgctgtggcgggggtgcacgtggaaacgcgcgctcgccgcgggcctgtgtgtcacggggttcattgagtgctggcagctgctggtgggccgggcctttgacatcgacgacctgtggctcaacaccctggggccttttgcggcttctggagctggtgcctgctggaccgggcagcccccggctggacccggcggttcagggtccggcaaatacaagactgacgaaatgaggacagctatggcggagatcatccgaacggagaatttacagtacgcctacccggcggacgagggagcggagccggttctggccctgaagggcgtggacctgaccattgagcagggctccttcgtggtggtgctgggccacaacggatccggcaagtccaccctggccaagacgctcaacggtgttctgctgccctgcgggggccatgtgtacgtggagggaatggacaccctggacgaacatctgctgctggccatccgccggacggtgggcatggtgttccagaacccggacaaccagatcgtggccaacgtggtggaggaggacgtggccttcgccccggagaacctgggggtttccagcagggagatccggcagcgggtggacgacgccctggcggcggtgggcatgggcgagttcgcccgccacgcgccccatctgctctccggcggccagaagcagcggatcgccattgccggcgtgctggctatggagccggaatgcatcgtgctggatgaggccaccgctatgctggacccggtgggccggcgggaggtgctctccgccgttcacaggctgaaccgggagaagggcatcactgtggtgctcatcacccaccacatgaacgaggcggaggacgccgaccgggttgtggtcatggacgacggaaaagtcattatggacggcgcgccccggcaggtcttcacacaggtggagcggctgcggtccatgggactgacggtgccggacacggtggacctgctggaccggctgcgcaaagacgggctggacgtgcccctcaccgccctgacggtggaggagtgcgcggacgccatcctggccgccgtttccaagtaatcggaagggaagagaacattggaaccgatactgcaagtacaacatctgacccacacgtacagcgtgggcacgcccttccagcgcagcgcggtggaggacatgagctttgacgtgtacgatggggagttcttagggatcatcggccacaccggctccggcaaatccaccctgattcagcatctgaacggcctgttgcggcctacgtcggggcagatcctgctccatgggaaggacatctgggcggagccgaagaagatccgggacgtccgcttccaggtggggctggtgttccagtacccggagtaccagctgtttgaggagacggtgtacaaggacatcgccttcggccccatcaaccagggcaagaccggggaggagctggaccgctgtgtccgggaggccgcccgcctggtgggcatccgggacgatcagctggacaagtccccctttgagctctccggcggccagaagcgccgggtggccctggcgggggtcatggctatggacccccaggtgctggtgctggacgagcccaccgccggactggatccggcgggccgggagaacctgatggccaacatccgggactaccaccgcaataaaaagcgcaccatcatcctggtgagccacagcatggacgagatcgcccggaatgtagaccgaatcctggtgctgaagtccgctcacgtgctgatgagcgggactccggcggaggtgttcgcccgggcggaggagctgctctctgccgggctggacgtgccacaggtgacccgtattgccatgcgcctgcgggagcagggcctcgccatcgaccctgcggtctacaccgtggaggccctggagcgggagctgctggcgctgagaagggggagacgggatgctgaaggacatcaccctgggccagtttttccccggcgacaccgtggcccaccgcctggacccccggacgaagatcctgctggtggtcctttacatcgtggcgctgttctgcgccaagagcctgctggcctacggcattctggcggcggtgctggcagtgtgtgtccgcatctcccgagtagggatcaaatccctggtgcgggggctgaagccggtggtgttcatcatcgtgttcaccggcattttgaacctgttcttcacgccgggagagcacatcctggcagagctgggcttcctgcggatctccgcggagggtctgcagaacgccgtgttcatggtgctgcggatcatgctgttgatcatgggcacgttcctgatgacctacaccaccagccccatcagcctcaccgacgggctggagcgcctgctgggcggattgaaaaaaatccatgtgccggtccatgagctggccatgattatgtccatcgccctgcggttcatcccaaccctgattgaggagacagacaagatcatgtccgctcagaaggcccggggcgcggactttgagagcgggaatatcatccagaaggccaaggccctgatccccattctggtgccgctgttcatcagcgccttccgccgggcggacgagctggcggtggccatggagtgccgctgctaccacggcggcgagggacgcaccaagctccatgtgctgcagtacgaggggcgggactatctggccctggcgctggggctggccgtcaccgcggggatcatcgtcctgcggcaatttacgtaacgatttgccggtccacggactggctgcccagggtgaggcccagccgcaggccgatggcaaaggcagccgtgccccagcggagatagcggctggagaggagatcacagacctggatctgcatgtcctgcggcatggacatccggtccagcgccgcctggatttccgcctcatcatagggcgcctgctcctgcatcagatggtcgccgtaggtatcgaacagaagctcaaaaacggatggcataggagacactcctttgcgaatacagctttttatggtatcatttcggaatgatgaaaccagtataatacagaaatttctgtaagtcaacagaacgatcagaaaaaactgtattttaagaaagggaatggtcctttggatgttttgactacctcagccagaattaaggcccgctgcaaagcgcagaaaatttcagtcaaaaatttgctggagcagacacagatcaaccggaattttatctatgacctggaaaaaggcggacagattccgtcagcggaaaagctggaacgcatcgctgactatctggactgctctgtggactatctgctggggcggacagacaacccggcggtcaaccgctgaccggcctcaccggaagaggattttctccggggggaatgtaggggagacagtctgccgtccggctgccccgcattttcaatcgcccggagctggtaatcatcgagatccgtccggacgcatgactggaaatcatggatagtggacatggcctgattcggagcggctgtgttttggcagagaggggagagtcctatgaagaagcagaacatctggctttgggccctgactgcggctgtggttttgctggcagcagccctggcggagacgcaaggacagctgggggaacttcagacggcgtattccgcgctccaacaggaggtgggagaactccgcctggacttgaaaagcacacaaaaccgcctccaggagcaggaggaggcgctggaacgagcggccgcccaaaccgccccgcagccggaggagtcgctgctggagcgctatgagctgacgccccttcggctggacgccgcggcccatcaggtggagcttggggtgtccctgaccctgactacgccggaccagtcggcggaagccaccctgaatgtctatcagggcggcgcggagcgcaagcgtctggcccaggtggagctgacccggtccggggatggaatcttctccggtcaggcggcggtgcctgcggacagcacctcactccagattctggtgacggtccggaccggcggcgatacggccacagagcggctctatgagggccgtgccaccggattgttgccgatggcgctgtccagccgcagcggagaggcggccctgcaggaaggagaagcccggattaccgccgccgtccggctgcgtgaaaaggcggccgcagcctccgagcagacattccgcctgtaccggaacggtcagttggaggagaccatcccggccgcctccggccaggaatccggcacctgggagggcaccgggacggtatcctgcgccgccggggaccagctggaggtgcggttcttctgcgtggacggcctgggcctgggatatgagttccctgtccggacctggacggtaaaggaggaccggctggcgccgggctggcccgtcaccaacaccccggtgctggtctggccgtaaacgggacggggcgctggcggaagaggcgcaggacggcaggagattccggccgccccggaaggcttatccccggatacatgaactgcggcgccgcacaggggagtccgtcagatccgtagacggcgaccggagcaatcctgcatcagcgagaggcccagccccaggccgatggcgaaggcagctgtgccccagcggagatagcagctggagaggagatcacagacctggatctgcatgtcctgcggcatggacatccggtccagcgccgccaggatttccgcctcatcatagggcgcatactcttgcatcaggctgtcgccgtaggtgtcgaacagagtttccgaaatgcttgtcatggggattcctccttaatatgtgttgttccgatatcctttttgtggtatggtatttcttatttatacgctaaacggattttatcatgtaatagcgtgattatcaagatgcttttcacgttttttcgtgattttagagctttacaaaaggcggggcaaattttatgtatgttacacaagacattgcagaccgcattaaatggcgcctcaaagaaaaaggcatccgcacaaaagatatgctgtctgatttgaacatgggaattaacgcgatatcagaatttgcaaaaggcaagcaaatgtcctgtattgcccttgctcgcatcgccgactatctggactgctctgtggattatctgctggggcggacagacaacccggcggtcaaccgctgagttgccctgccggataaaaagagcgttcccgccgggaaccccgggcggcggaactgccaaaggagagcttatgcgcaacattgccctgaaactcatgtacaacggcaccgcctaccacgggtggcaggtgcagaagaacgcggtcaccgtctgcgggaccctggagaaggccattgctgacatctgcggcggcccggtacacctcaccggctgcggacgcaccgacgccggtgtccacgcggagcactacatcgccaacttccgcacggagagccgcattcccgtggaccggctccccttcgccgtcaacacccacacgccggaggacatcgcggtgaaggaggccttcgaggtggcggaggacttcaacgccatcggctcctgcatcaagaaggagtacacctaccgcatctacaactcccggttcaagaacccattttacgtcaaccgggcctacttctatcccaagcacctggacgaggaattcctgaaccgggcagcggggatgttcgtgggcacccacgacttcgcggcggtgcgttccgtgggcacggagacgaagtccactgtccgcaccatctattactgtgacgtgacccggaacggagatctgctggaattgaaggtctgcgccaacggctttttgtataacatggtacgggccatcaccggcaccgtgctgtacgcggcggagggcaagttcaccccggaggacatccccggcattctggagcggggggaccgcaccgccgccggtcccacggtgccgccgggggactgtacctgacaagactttggtatgaggatgaacggctcaatggctgatacgacgaacgacatctggaacgacaacgacggggaagaggacgaggctccccggaagggcggacggctgcgccgctttgggatcttctttctggtgctggcggcggtgctgggcgtggtgctcgtggccgcgtaccgggacggcaccggctttgacgccctgcggcggctgtgttcctacggcagcggagaggagagcactgctgaggcccagtacgactacgacgcctccgacagcaaccgctttgccgtcctgggggattccctggtggtgctctccgacacaaagctgcaggtcctggcgcggggcggagaggagatctggtccacatccgtgcggatgagcgcccctgccctggagacgggcggcggccgggctgtggcttacgacgtggggggcacagagctgtatgtggtggacgaggggggcgagatcctcacgctcaccgcaccggaggacgccccctatttctccgcccggctgaatgaagacggttggctggctgtgaccacagaactgccgggctacaagggcggcgtcaccgcttataacagccaggggacggaggtgttttcactcaccgcgtcggaccggtttgtcatcgacgcccgggtgacagatgacgataacactctggcggtggtgaccttaggccaggagaacagcgtgttcgtcagcaacatggtactttacagcctggagacggcaggaaatgtagacccggcggccgactacgatgtgaccgacggtctggtggctgccgtcggagagcaggacggccagctggtgacggtgtccgacacctgcctgacctacgcgtccccggccggggaggtgcgcgctacctactcctatgccggcagctatctgcgggaatacgacttgcacggggacggcttcaccgccctgctgctgaaccggtacaagtccggcggtgtgggccggttggtgacggtggacacggacgggcaggagatcgccgccctggacgtgaacgaggagatcctcagcatctccgctgccggacggtatctggcggtgctgtatatggacagcgtggtgatctacacagaggagctggagatctatgctcagctggagggcacggactacgcccggtcggttctgatgcgccaggatggctctgccctgctgctggcggcagagagcgcccacctgttcctgccttgagtgggaaacattgatcttggaattcacaaaacgtttacgagcaaaaaggtaggcaagcatgacaacacctgttataatagacgtgattatggctgtggttttgatcgctgcggtcatctacggtgcccacaggggccttttccgggccctggcgggattggcggtggtgatcgtggccctggtgggggcggccatcatcgcaaataccctggccgccccggcggcccgtctggtgacgcccctgatccgggagcaaatcgagacgaaggtggacgaggctatggcccggcagtcccaggaggtccagatgccggaggaggacgtggacgagggcttcgccatcgaggacctgctggccctgatgggactggacgaggacgtgcggaactccctggccagccagacgcaggagaagatccaggacaccggcgtctccttggtcatggccgtggtggagagtctggcccagtccattctctatgcggcgctgttcctggtctccttcgtgggactgacgatcctgctgaagctgctgatccgggctatggacttggtgctgcagctgccggggctgcacctggtcaacgccctgggcggcgccgtgatcggcctgatcgagggggccttggtgctgtttctggccatctgggttctgcggcgcttcggcgtctcctttgagacagacaccgtctcagccacccatattttacgattttttgcgacacacacgcccctgagcgcgctgtcgcttctgcaatgacgaacggggccgttgccccgccggcgtcacgatttctggagggatttacacgatgcagccgacactttgttcaagatgcaagaagaacgtggccgttgtcttcatctccaaaatggagggggacaagaccaccaacgagggcctgtgcctgaaatgcgccaaggagctgggcctgccccaggtggacgatatgatgaagcgcatgggcatttccgacgaggatctggacacgctcaacagtgagatgctccaggccatgagcggcgtggagaatatcgaggacctgcccggcggcgaggacgccggggaagaggaggaagagggcaagaccgccaccttccccttcctgaaccgcctgttctccggcgaggccgccaagggcggcgagagcggcggccaggaggaaagcggtgcccgaagccgggaaaaggagcgcaaggaccctaagaacggcaagcgcaaatatctggagaactactgcatctccctgacgcagcgggcccaggagggaaagctggacccggtgatcggccgggagcaggagatcgagcgggtggtgcagatcctgaaccgccgccagaagaacaacccctgcctgatcggtgagcccggtgtgggtaagaccgccatcgcggaggggctggcccagcggatctccaagggcgacgtgcccttcaagctgcggaacaaggaggtctacctgctggatctgacagctctggtggccggcacccagttccggggccagttcgagagccggatgaagggccttatcgacgaggtgaagcgcctggggaacattattttgatgatcgacgaggttcacaacattgtgggcgccggcgacgccgagggcagcatgaacgccgccaacatcctgaaacccgccctctcccggggcgagatccaggtgattggcgccaccaccttcaacgagtaccgcaagtccatcgagaaggacaccgctctggagcggcggttccagccggtgacggtgaacgagccctccattgaggactctgtgcagattctccagggcctggccccaagtatgagcagtaccacggggtgaagatctctgaggggatcctgcgtcaggcggtgctgctcagtgagcggtacatcaccgaccggttcctgccggacaaggccatcgacctgatcgacgaggcatgttccgacctgaatctgaaagacccggatatctcccgccgcatggagattcagcgggagctggacgactatgagaaagagcgcaccatgctggaggagcaggaggagaaggccgagggcgactacgcccgcatggcggagctgaagagcaaggaactccagctgaacacagagctgaacagtctgctggaaaagggcgatccacagctctccatggagaatctggcccatgttatcgagctgtggaccaaaatcccggcggccaagatccgggagcaggagttccagcgcctgagccagctggaagtgcggctcaagagccatatcatcggccaggacgaggccgtgtccgccgtagccgccgcggtgcggcggaaccgggtgggcatctcccccaagcacaagcctgtcagcttcatctttgtggggcccaccggcgtgggcaagacagagctggtgaagcagctggcaacagacctcttcaacacgccggatgccttgatccggctggatatgtcggagttcatggagaagcactccgtctcccgtctggtgggctcccctccgggctacgtggggtatgacgaggcgggccagctgacagagaagatccgccgcaagccctacgccgtggtcctcttcgacgagattgagaaggcccatcccgatgtgctgaacatccttctccagatcctggatgacggcgagatcaccgacgcccacggccgcaaggtgaactttgagaataccatcatcgtcatgacctccaacgccggcagcgccaccaaggagggcaccgtgggcttcggccgctccgtgaacgagcaggacgccgaccgggccatgaaggcgctccagcagttcctgcggccggagttcatcaaccgggtggacgcggtcatcaccttcaaccgcctcagcgaggagaacttccacggcatcgcacgtatcatgctgaacgaactggtgggttccctgaaggagaaaggcatcaccttcatctacgacgacgcactggtggagcttttgacgaagaagtcctactccctgacctacggcgcccggaacctgcggcgcaccatccagaaggagctggaggaccccatggccacaaagatcatcgacagctacgagcatcccatcacccaggtgaaggccacggtggaggacggtgccattcggctgtacaccctgtgaccggaggaagaggagagggaggaccatgctgtttcggaaggatatggatccccgctgtgcctactgccagcggggccagcagatcaacgagcgggaggtggcctgcgtcaagcggggcatcgtggcggtggagcaccactgccgggcattcaaatacgaccccttgaagcgggtgccgccccggccggcagcgctggagactgaacggctgaaagaggaagatttttcgctgtaagcagcgttcagcacccgcctggggaaaatccccgggcgggcgctgtcacaaatgggaaggagaggagacatcatggaagtcaagcggatctgcgcggcgtactggagcgccacaggcaacacagacaagacggtgaacaccatcgcggagaccctggcggagaagctgggcgtccctctggagcggaggaacttcacacgcccgtcagaccgggcggaggatctgtcttttacggggagagacctggtggtgttcggtatgcccacctatgcgggaaagctgcccaacaagatgctgccctatgtccagcagcagatccacgggaacggcgccctggcggtgggggtggtcaccttcggcaaccggtcctacgacaactccctggcggagctgtgcgccgcgctggaggcggacggcttccacaccgtggccgggggcgcctttgcctgccgccacgcctttacggacgcgctggcggacggccgcccggactgggatgacaagcggcagatgggggagttcgcggcccgcattgcggacaaggtaaaagacctgacggacatccctgctccggtggccgtgccgggcgatgcggcggcgccctactacgtgcccaagggcacggacggccagcccgtcaagttcctgaaggccaagccccagacggatttgggcaagtgtaccgactgcggcgcctgcgcccgcctgtgtcccatgggggccatcaatccctccaacgtggcggaggtgcccggcacctgcatcaagtgccagcggtgcgtccgcaagtgcacgaagcacgccaagtactttgatgacccggcctttttgtcccacgtggccatgctggagcagaacttcacagaacccaaggagaatgaggtgtatctgtgaggcggtgggttcttgcctttctgatggcggtcacagccaactgggtttctctgatctatgcgtttggcccggtgagctggctcttgacgacgatactgcttctggggagtttctctattttaatctgcggcccattgagaagagcggtgcgcctacaaagcggatctggtatttgaaaagcggctgcgaattgctgcgcctgtttttgattacagctacggtcacagtctttgtgcagatggtatggctgtggtgccagatttccatgataacgccggagaacagccttgccgctggaacagctgttgcaggtgcggcttttggtgttctctgggctgtcttgctggaggccatcgtcttctggaacggcatgatccgggtgtatctcacctccgtccagctggggctgaagcaccgggtgctggcggccctgtgcgggtggatccccattctcaacatctggtatctgcggaagattatccgcatcaccgccgacgaggcggagttcgagacggagaagtgggagctggacaccgcccgggcggagagcgagatctgtaagacgaaatacccgatccttctggtccacggggtgttcttccgggacttccgctatgtcaattactggggccgcattcccaaggagctccagcgcaacggcgcaacagtgtactacggacagcagcagtccgccgccgcggtggaggacagcgggcgggagctggcggaccgtatccggcagatcctggcggagaccggctgtgagaaggtgaacatcattgcccactccaagggggactggacagccgggccgccatcgcccacgctggatgtgccccctgtgtggccagcctcaccaccatcaacacgccccaccggggctgcatctttgccgaatatctgctgaagaagatccctgcagcggctcggcagaagatcgcagatacctacaacgccgccctgaagcggctgggggatgaggccccggacttcctggcggcggtgacagatctgaccgcctctgcctgcgaggccaggaacgcggctaccccggacgcccccggcgtcttttaccagagcgtcatgtcctattgcagaaaggcccagcacggcaagttccctctaaacatgacctatcctatcgtcaagcactttgatggattgaacgacgggctggtggcggtggactccgccaaatggggcgatcagttcaccctgctggagccaagggggcaccggggcatctcacacggggatgtggtggatctgaatcgggagaacattcccggcttcgacgtccgggagttctatgtctccctggtagcggatctgaaaaacagaggcttttgagcggaaaaaagcggagcgtcacagggacgctccgctttcgtgttccgtggtgtcttttatggtgggggccaccggttccacaaggggatccgccgccccgccatcctctgtggtgtcatctgcgggggaacaataggttttgtacagcgccacatggtcgtagatggcccgccaggagctgtaagcgtctgccgtcacacagatatagcgtctgccgtccgctgtttcgccgcagctggcggcgcagttgccggactccaccacatagccggtcttggcgccggtgacctcaatgccgccggtatccttgtcctcgatccgccgcaggaaccaattggagaggatctgcccctccgggtggtccgcagtggggagagtctcataggtccgggcccccagcacctcccggcacaggtcgttgtccatggccgcctccaggatcaccgccatgtcggagaccgtgcacttgtgggcctcgtcatacagtcccacgcagttggtgaagtgggcggtgtccgcgatgccaagctcctccagcttttcgttcatcagcgccacgaacgcctcctgggagcccgccacataagtggccagccccagcgccgcgtccgcaccggaggagaggatggtgccgtagaacaactcacgcaccgggaccgtttcgtcaaccatcagccccaccacgctgcacccgttgacatagcagtagtcggtgatgtcgatggtcatggtgaaggtgtcgtccagctccgcttctgtgatgtgctcagcggccaccagaaccgtcaggaccttcgtcatggaggcgggagagatcacagtatccgcgtttttctccgccaggaccgtccgggtgtccaggtcaaccaggaccgcgcagcggctgggaaagtcctctcccagctggatcgtgtccgggccggacacggccctggcatagggctccggcgcaggggcgctggcgacggatgtcacctgaaagggccgttcggccttaaccatctccggcgcaggcttttcaatcagctgggctcccacggtcaccaggcctacacacagaacggccagcagcccgcagggcaccagacggcgaagcagccgccgccgcttttcccgctgcttctttcggcgggcctccgcccgctgggcccgccgggtggcccgctcctcgtccgtgataatgggcttgtactcctcgtccatatcggcgctcctatctgaaaggcgggcctgtccggcaccgccgcagtctcgtactcttcattataacagatgatggaagaaaatgcatctcctattttccggtttggcagagggaattttatccatccggcttttgacccgtgaaaaaccgctgtcaggccaagttgtttttgcatagcctgagtgtaagaacaacacttggaggggagcgtatggctcaagttacccattttttcgcaggcgctaacagcggtgacggcttccagaacctgttttcggagatcgtggacctggaagacacctatgacctgatggttttgaaaggcggccccggcgtgggcaaggccaccttcatgcgggagatcggccgaagcatggaggaggccggcacaccggtggagtacttatggtgttccggcgacccggattccctggacggcgtggtgctgccggagctccgctgcgccgtggtggatggtacgtcgcctcatgtggtggagccccggtaccctgcggcggtggaccggtatgtggacctggggcggttttacgacctcaccgccgccaaggccgcggcagaggaggtgaaggctcatacccgggcctacaaggccgcatatatccgggcctatcaccatctgaaggctgcccggcaggtggagctggatgcagtggcggcggtgcggaagaccttcgaccgggagaaggcggaccgccggacggcgggcattctctcacgggagctgcgccgccggggcggtgaggcggggaagaccacccgccgcttcctgggcagtattacccacaaggggtacatctggcggtttgacagtgtggacgccctgtgccccaaggtctatgagctggcggacagctgggagctggcaggggagatgcttgcccggctgcatcgggcggcggcggataacggctgggacaccatcgtctgctgcgcgccggaggagccggggcggatcgagcacctgctgatccccggactggggctggccttcgtcacctcccggcccggcatggagtacgggcagaagcccttccgccgggtgcggctggacgccatgacggaacctcagggcaaggcccggctgcggttccagacccggatggcggcactcctgcgggaggaaggggccgcggcgctgaaagacgccaaagccaaccacgataagctggaggcagtctacaacccctatgtggatttcgacggtgtccgaaccctggcggcgctggaggcggggcggcttctcagctggctgggttgaatcagatcaggatgcgggccccggcggtataccgccggggccttgccttatgcgaacagatgtgctacaatgctggaagcgaaaacaggggcaagacagccccagagggaacgggactatgaccaaggaagaagcactgaaaacctattacggctacgacgtcttccggggcggccaggaggcggtcatcgacgcgctgctctctgggcgggatgcgctggccatcatgcctaccggggcggggaagtccgtctgctaccaaatcccggccttgctgctgtcggggatcaccctggtggtctcgcctctggtgtccctgatgcgggaccaggtgacgcagctggtgcagatgggcatcccggcggcgtttctcaacagctccctaaccttccgccagtatctgctggccctggaccgggccagggcggggcggtacaagatcatctacgtggccccggagcggctggagaccgagggcttccaggcctttgtgcgggaggcagacatctccctggtggcggtggacgaggcccactgcatctcccagtggggccaggatttccggccctcctacctgaacatccccgcctttgtggagagcctgccccaccggcccccggtgggagccttcaccgccaccgccacgccggacgtgaaggcggacatccaccgcctgctggacctgcaggacccgctggagctgaccaccggctttgaccgggagaacctgtattttgaggtccagcagcctgcggacaagcgggcggcgctgctggagctggtgaagggccgccccggcaagtgcggcatcgtctactgtgccacccggaagaatgtggaggaggtgtgcgacttcctccgccagcggggggtagccgccgcccggtatcacgctggcctggccccagaggagcggcagaggaaccaggaggacttcctctacgaccgggtgcaggtgatggtggccaccaacgccttcggcatgggcatcgacaagtccgatgtccggtatgtcatccactacaatatgcccaaggacatggagagctactaccaggaggcgggccgggcgggccgggacggggcgccctccagctgcatcctgttgtacagtggccaggatgtgcggactaatgagtttctcatcacccacagcgagccccgggaggacttggatccccggacggccgagcagctgcgggagcgggacctgcagcggctgcggcagatgaccggctactgccggacacgccggtgtttgcggcagtatatcctgcactacttcggcgagcacgcgccggacacttgcagcgcctgctacaactgcctccataacttcgaagaggtggatgtcagccgggacgccaaggccatcgtggcctgcattgccaaaaccggacagcacttcggcgtgggtgtcatcgcggagaccctctgcggtgcggacacggagcgggtgcggaagtaccacatggaccgggaggatacctacggcgctttgggtcagctgacccagaaggaggtccaggagcgcatccgcttcctgctggaccagggcgtgctggagctgagtccggggcagtatccggtgctgcggctgacggagcgggcggaggacgtgatgtacggcgaatcgacgctccagatgaagacgctgcgggaggaccggtccgccccggcccgccgggcggcggccggggagctggagggggatgcggcggagctgttcggccgcctccgggccctgcgggcccagttggcccggcggcagggagtccccgcctacgtggtgttctcggacaagaccctgcgggagatggcgatttcccgcccccggaccacgacggagctgcgtgcggtcagcggcgtgggctccgccaaggcggagcggtacggccgggactttctgacggtgatccaggactttccgtcgtgacggagatcagaagagacaacaggcgctgccccatgcgggacagcgcctgtctgtgttttttcagttcagaaaatccttcagctttttgctgcggctggggtggcgcagtttccgcagggccttggcctcgatctggcggatgcgctcccgggtaacgttgaattccttgcccacttcctccagggtgcgggtgcggccgtcctcgatgccgaagcggagctttagaaccttttcctcccggggagtgagagtggagagaacatccatcagctgctccttcagcagggtgaagctggcggcttcgctgggctcactggccccctcgtcggggatgaagtcgcccaggtgggagtcctcctcctcaccgatgggggtctccagggagacgggctcctgggcaattttcaggatctcccggaccttctccaccggcattcccatctccgcgctgatctcattgggagacggatcatggcccagctcctgcaggagctggcggctgacccgaatcaccttgttgatggtctccaccatgtggacagggatgcggatggtgcgggcctggtcggcgatggcccgggtgatggcctgccggatccaccaggtagcgtaggtggagaacttgtagcccttggtgtagtcgaacttctccaccgccttgatcaggcccagattgccctcctggatcagatccaggaacagcatgcccctgcccacgtaccgcttggcgatggacaccaccaggcggaggttggcctccgccagcttctgcttggcggtctcacccttggcgtgggcggacttccaggcggcgatctcctcctgggagtaggggatctcctgcccctccttccggagccggtcgatctccgccagcttccggtcggcctcgttgcccgcgcccatggcctgggccaggtcgatctcctcatccggggacaacaggggcaccttgccgatctctttcagatacatacggacaggatcgtcgatggagaagctgttcaccagagtgttgggatccaccagctcctcttcctccacatcggcgatctcctctgcggcgggctcgtcatccggcaggtccgccaacagggcatcgtcggcgctgatgtcgatgttcagcgcctccagggagtcgtagagctgatccatctgatcgctctccagattcaggtcatccaccgcgtccatcagatctgcggagtccaacttgcccttcttcttaccgcgggccagcagttcccgcagtttttcgttgttcatcagccaggaggctgcgggcagcgcagccacctgcttgtcgtccagccggaggatgccggccttccgggcctcctcgtccgtcatgacggcgggggcctcctgggccgtctcctccccctttttccgggtggactttttggcagactttgcagccggctccctctccgcggccttctccgccgcatctgcggccgccaggagcgcgtctgcctgtctcttcagctccttggggctcaactcaaactcatttgccatgctgctttcctccagtaccctttttgtctttgtatttttctgtggccgccagcagcgggtcggcagtcccgccccccagccgcttctcggcctccgtctgtacgatgcgtatgtagtccgccagcgcctgttgtccgtttcgcagagactccggctgctggcagacgccggtgagatggttcatctcctcctgggagaagaactccgcctgggccgccagggaggggacgcgtcctgccgccttggcctgccacagcgtggtaaaggcacggcccagcagtggggaggagaactgctcctcccgcaggggcggctcctccgggaacaggctctcgtcccggatcagcagccgcaggatgccctcctccgcccgggcggagcggatgttgtcgtatcgcagctcccgctccttgggctggagctggaccgccgggttcaggtcccgccgcagctcctgccgcttctcccgggagaggcggcgtttgaaggcccgctggacctccagcctcatgacctccggcgtgatcttggcggtctctgcggcccgggtggtgtagatctcccgctctaccggattggcaagtgcggccagcagggcgctgacctcctcacagtaggccacacgggcctcgtcactggagaggtcgtacttacccgccacctgggccatgcggaactcgatgccgttctcactgccggtcagcagcgcctcgaaggcgtcttttccctggagcttgatgaagtcgtcggcgtcctgctttaccagttcgccatcctccgtccgccgccggggcagctgaaggaccttgaccgaaaactccgagttgttcaggatctccagcgcccgctccgtggcgatcttgccggcgttgtcattgtcgtagcacagcaccagctccttcgtgaaccggctgaggagccgtgtctgctccactgtcaaagccgtccccatggaggccactgcgttgtcgaatcccgcttggtggagcgttaccacgtcgatgttgccctcgcagaggatgatgttggaccgcttggatttcttggccagattcagtccgtacagaacccgccgtttggagtacaccggtgtctcctgggagttcatgtacttgggctcagacttgtccaggacccggccgccgaaggccaccacgtctccccgcacatcgatgacaggaaagatgagccggttgcggaacttgtcgtacaggccgccgttccggttctgcaccgccaggcctgcctccagcagctccgacttcgtgtagcccttcttcgtcatggccaggatcagcgcgtcccaggcatccagagaggctcccagaccgaagttcactgccgtggccctgcgaattttccgccggtccagatattcctgcaccgcccgcccctccggctgttggagcatctgatagtagaaccgggccgcgtcccggttcaggtccagcagacgctggcgcctgcggcccgcctcccggtcgccgtcctcctccggcacctccatccccgcccgtttggccagaaagcgcaccgcatccgggaaggagagattctcctcctccatgatgaagttgataacgccgccgccccgcttgcagccgaagcagtagtagatctgtttgtccggagagacggagaaggagccggtcttctcactgtggaagggacacagaccaaagagattcgcgccctttcgggtcagctgcacatagctgcccaccacgtccacgatgtcactccgggccatcagctcgtccagaaagctctggggaaagggcatgtcaaggtctcctcctttcggtgagtgttgccagatttcccgagggtcatacccgaaagcgagggcgtacccaaaacgagacattttagatataccccgttcttttgggatttcctctttttttgctggattttttcaaaaagtttttgcctagtgggtttacagactgccgcggcctgcgtaaaatggtagaaaagcgtcgaagcggcggagaggaggcgtgagatgtccatcgagctttgggcggcccggttggagcgcccgctgacggagcgggagacggaggccatgctgcccctgctgcccccggagcggcaggagcggctgctgcggatcaagcagtcggaaaagcggcgggagcccctgtgcgcctatctcattctacgccatgccttgtgggagcagtaccgctggcgggagcttccgcctatccggctcacctctctgggcaagccctacttcccggatttcccagaggtccacttcaatctgagccacaccaccggcgcggtgctggtggccctgtccggggagccggtgggggtggatatcgagcacatccggccggtgagcgagcgggccatgcggcgtctggcggatgtgaccacggaacgggccttcttccagagctgggtccggcgggaggcccgggccaagcgcagcggcgccggcgtggggaccatgctggcgtcggagaccccgctccagcctggggagcgattctattttctggacacctttccgggctatgtggcgggagtggccacccgggacgggggcccgccaggccaggtgcgcaaatactccctggatgatatgatgggataaaagcgggggagaaaaaaggcggcggggcagtgccccgccgtctcccggtcggtttatacgatcttccgcaaaggcagcggctccgccgcatccttctgctccgcaaagtagcggatgatgtcttttcgggtgacgatcccggtgaagttccccaggtcgtccaccacagggatgaagttctggttcatggcgctgtggaggagctcttccatggtgacggtgatccggacgggaggatagctgttgccccgcagaatgtcccggacctgcagccgctccatgtccttcatggagtaggcagtcaaggtctcgcagtccttggacaggagctgccagaggaaatccccctcactgactgtaccgacatatttcccatcccggctgatgacggggatggcggtatagccgtggtgccgcatcttttccagtccctgacggaaggtgcagtcatcgtacagataggcgacgctgtgcttcgggagcagaaaataagctatgttcactttgctgcctcatttctaagggcgggggcccgcccgtattcggcctttccggccttctaaaaaaagtatacaggaaatgcctggggaattggtgaataatctatgaaatctgccggagaacggtctttactttttcgacagaggctgttattataaaatgtgatatatgcaacagaagggagcggccgcgatgttgaccccacaggaactgaaaaagagccccttgtttcaggacatcgggtacgagaattaccagcagatgctggactgctttcaggcggtgcagcggagctatcgggtggacgaggtgatctacgacttctccggcccggctggcaacgccgtaggcgtggtggagcggggggaggcatccctgatccgcatcgacgaggagggagtcgccactgtgctggaggagctgggccccggcggtgtgttcggcaagagcctggcgttttccacctccggccgggacagcttggaagtggtctgccgcacggcctgcgacgtggtgttcatcgactatccccatattctgaagcggtgtgagcgggcctgcacccatcatagcctgctggtgcagaatatgctgcggctgatctcagacaaggcccaggccctgtccgagcgggtggacgttctctcccgccggtccatccgggaaaagctcctgtgctacttcaaccagctggcggagaaggaggggagccggaccttccagctgcccttctccctgagtatgctggcggattacatcgccacggaccgcagcgccatgatgcgggagctgaagcgattgaaggaggagggcgtcctccggtccgaggggcggcgcatcaccctttgtacaggatgattgaccggccagaaggggcgctggaaagtttgttatttttttcgcagaatccccgcaaaaacggattgactgctttcgggggttgtgttaaagtatagacaatgtgtcgtgtcgaaggatacatcgccgcaaataccaaaattcgatcattcgggaaagaaggaacactatgtatcgtatcgtgagaaaagaggccctccgtcccaccgtcaccctgtatgagatcgaggcacccctggtcgccaagaaggcccagccgggccagttcatcatcctgcgcgtggatgagaacggcgagcgaatccccataacgatcaacgactataacccggagaagggcaccgtcaccatcatcgtccaaaccgtgggcgccaccacggaaaagctgagccgcatgaaagagggcgacagcctccaggactttgtgggccccctgggcaaggccaccgagaccgagggcaagaagaaggtctgcgtggtgggcggcggtgtcggctgcgccatcgcgtatcccgtgctgaagaagttccacgactgcggggccgaggtccacgccgtcatcggcttcaagaacaaggatctggtgatcctggaggatgagttccgggccgcaagcagcgtactgaaggtctgcaccgacgacggctcctatggccagaagggcgttgtcaccgaggcgctgaaggagctgattgacgctggcaaccagtatgatgaggtgttcgccatcggtcccatggtgatgatgaaatttgtttccaagaccacggagccctacggcatccccaccaccgtttccatgagccccatcatgattgacggcaccggcatgtgcggcggctgccgcctgagcgtgggcggcgagatgaagttcgcctgcgtggacggcccggatttcgacggccacaaggtggactgggatctggcggtcaagcggaaccagatgtatcgggactttgaggcccacaaatatgaggagacctgcaacctgttcaagaaggaggccgaataatcatggccaatatgtctttgaagaagaatcccatgccctctcaggagcccgatgtccgcaacaagaacttcgacgaggtggccctgggctatactgaggaaatggccatcgacgaggccaagcgctgcctgaactgcaagaaccccaagtgcgtgaacggctgccccgtgaacgtacatattcccgagttcatcgccaaggtggcggaaggcaagtttgacgaggccttcggcgtcatcacctccaccaacagcctgcccgccatctgcggccgtgtctgcccccaggagaaccagtgcgagggccagtgcatccggggcatcaagggtgagcccgtgggcatcggccgtctggagcggtttgtggcggactatcacaatacccacggccatcagggcggcgctcccgtcgtgccggagagcaacggccacaaggtagctgtggtaggctccggccctgcgggcctgacctgtgccggcgatctggcccggaaggggtatgacgtcaccgtgttcgaggcgctgcaccaggttggcggcgtgctggtgtacggcatcccggagttccgtctgcccaaggccattgtggccaaggaggtggcccggctggaacacttcggcgtgaagatcatgaccgataccgtggtgggccgcaccatcaccgtggacgagctgatggatgagatgggttttgaggccgtgttcatcggctccggcgccggcctgcctatgttcatgaacatccccggcgtcaactacaagggcgtgctgtccgccaacgagttcctgacccgcatcaacctgatgaaggcatacctgcccgattccgacacgcccctcatccatcccaagaaggtggccgtcgtaggcggcggcaacgtggccatggacgccgcccggtgcgccaagcgcctgggtgcagaggtctatgttgtgtaccgccgcggcatggaggagctgcccgcccgccgtgaagaggtggagcacgccgaggaggaaggcatcatcttcaagactctctgcaacccggtggaggtgctggcggacgagaacgacgatgtgaagggaatccgctgcatccggatggaactgggcgagcccgatgcctccggccgccgccgtcccatcgaggtccccggcagtgagttcgacgtggacgtggactgcgttattatggccctgggcaccagccccaaccccctgatcaagtccaccaccaagggcctggaaatcaacaagaagggcggcatcgtggtgaacgaggacggtctcacctcccgcgagaatgtctatgccggcggcgacgccgtcaccggtgctgccaccgtcatcctggccatgggcgccggcaagaccgcggctaaggccatcgacgaggcgttgagcaagaagtaagatctcccggactttttacaagacgggcagcgaaagctgcctgccttgtcccttttggttggaatctgtcggattagccttgacagcaggtgcggggaccgatacaatcaaggtgcctggttccctcaggtggagggcgccacgcggctttgggacagcgcggaggcgaacgcggcaaactgtgtcttggagggaaaaacgatggcttattgcagaaaatgtggtgcattgatcgatgactatgcggcggtctgcccgaaatgcggcacacctcagaacggaggaccgaataatcctccaccggcagcggacaacggcggcttcctgtgggggcttctgggctgctgtattcccattgcaggattgatcttgttcctggtatggaaggataccaagccccggactgccaaggcggcgggcatcggcgccctggtgtgcgtgatcgcctatgtactgatgtacgttgcggcggcggttctgggcatcagcgcagcggtgtatgcctattaagctgcggcgctggctttggcggtggcttccgattctcttcggatgccactgccggccggatcgctctttccattttcgggacggaacgccctttcccatctgcgcccggtgcaccggggagctggcgggcatcctggcggggctggcaacctggtgggcggtccatcccccggcgggagtggcggctgtgctgctggttccgttgattgcggacggacttctccagctctgtacgccctatgagagcggtaatctccggcggctggcgacggggctcctcttcggctacgggctgacggtgcttctgctcacgtccttgggctgggcctatcaatggggctttggctttgggaaaacattgctggatccctgagaagatcagcagccgtgacatccaggaggcaagaccatgctggaactgtgttttgatatgtcaacctgcggtgccctgcgggtggcccagcgctgcggcgggagcggacggaaaggcttcggattcgttctcagccgcacagaggacggcggaaatgtgacatctactacggtcatcggcttcgatgacggaaaagcgcccgcgggagaagagatccaccagatccagcgggcccagcggcggcaggcggccctggaacgggaggccatccccctgggcggcagtccgagtgatgtactggtcttgtccctgggactggatatgggggatatccgagaaccgctgggggcggaccggtgggacctgctgcgccggtggtgtgatggtgatgatgagaccacggaccgggactggcagcggaatttggaggcagcggagcgattgaggtcctgcggctctagggacgccgtccgtatttgggtggaccatacgccatacggcgcctgcggtctgctccacgctgccagcctgctgaaagacacaaaggccgacgtccgcgtggtgttcctgccgccctggcgggagcggccggacggcgtcgtggagacctacctgggttggggcgaggtggagccggagctgttcggacgcttcctgtcccgggaggagccgctgccgccggtgatgctgggcgctatggcccatcggtgggaggtgctccggcaggagaacgccccgctccgggcggtggtgaacggccgggtccgcagcgtgggggaggacttctacgacgaaatgatccgacgccatctgcccgagggccagacgaagatcgccaacatcattggagaggttctgggccgggagaagccgggcatcggcgacgtctggctggcggagcgcatccggcagatgctctccaccggggagctgcggatgctccgggaggaccgggagcggttttaccgctctgtggtagaaaggacttgacatttcccgggaaatctgtaaaataaaacatcaatataggtccgccgccgggcggacaaaggcgtttgcccctgcatccgtaggccattggagatgcggggcgcgggcgccttttattttttgctgtcagaggaggagtgatttgcatggcatgggtatttctggcatgcgcgggacttctggaggtgttctggtcctcgttcctgaaactgtccgatggcttcacgaagctgggctggtccgtgatgaccattgcggggatgctggccagcttctatttgctgagccaggccatgaagacgcttcccctgggcactgcctacgccgtctggaccggcatcggggccgtaggctccgtggcggtgggcatcctgatcttcaaggagccggtgaccgccgcccggatgtttttcaccgtgttgctgctgacgggcattgtcggcatcaagctgacctctccccactgagggaaaacagaaaacgaggaccggtccggtcctcgtttttccatagatgccgttacaggtccaccaccgtcacatcgtggcccgtgtgggggagaaagacatgcagcaggtcctccgtccgcaggcggaggctggcgtcgttcttgcaggggtggcagccgaaccaggccgcgtcatggactgcccggtccatcaccagccggacccggcgctccgtgtcataggccaggcccagcacgctggcagagccgggggtgcagcggagcatggactccatcagctccggcggggcgaaggagaggcgggtggtgcccagttgggcgctgaggaccttggtctggaagggcttgccgccgggcatggtcagcaggtagaacgccgtcttctgccggttgcagagaaacaggttcttgcagatggagatgcccagcacctcgctgaccacatcgcagtcggcgatggtgtcggcggtctcgtgggccacccaagcataggggatgcgcagccggtccagcagggcaaaggtctccagctccacggcggcgcggccctctgccggggcggcggtgcggctctctgagatctccacggctcacacccccgccagcagcttttccccggcccggtagatgtcaccggcgcctacggtgaggatcaagtcgccgggccgggccgcctgccgcagagccgccgccgccttgtccagggtggagcagtacacagcgccggggatattgcggcacaggtccgccgaggagatgcccaaggtgttctgctcccgggcggcgaagatctccgccaggatggccacgtccgggattttcagctcttccacgaaccgctcgaacagcttggcggtgcgagagtaggtgtggggctggaaggccaccaccagccgttcataccccatttccttggcggtggtgaacagggcgtggagctcgtcggggtgatgggcgtagtcatcgtagacctccgccccatgataggtacccttgtgctcgaatcggcggccggcgccggtgaaggaggccaggcccgtctccaccgcatggcccggcaggcccagtgcccaggccgcagaggctgccgccagggcgttgagaacattgtggtggccgtagacgtggagctctacgcgggcgtatttctcgccgcggatcatcacgtcgaataccggcctgccgtccacctccgtcagattggcggcggtgcagtcggcggcatggtccaggccgaaggtgaagatgggatgctccagcccggccaccgcctccatggcgctggcgttgtccgcgttgacgatgacggaccccgccgggggcaccagctccgcaaaccggcggaaggagtgctggatgtcggccagatccttgaagaagtccaggtggtcctcctccacgttcaaaatcactgccacggtggggaagaagctgaggaagctgttgcagtactcacaggactccaggatgatggtgtccccctggcccacccggtagccggcgtggagcaggggcagggtgccgccgatcatcaccgtgggatccgcctccgccgccatgaagatgtgggtgcacatggaggtggtggtggttttgccgtgggtaccggccacgcacagcgcgttgggataccgctgcatgatggcaccccaggcctgggcccgctcgtacacggggataccccgggccacggcaccggcgatctccgggttgctgtcgtggacggcagcggtgcggaccaccagatcgcagtcccccaggttttcggcgttgtggccgatggccacggggatgcccaaggaccggaggtggcggaccgtgtcgctctccgtcatgtcggagccctggacatggaggcccatgccccgcagcacctccgccagggggcacatggacacgccgccgatgcccaccagatgggcccgcttgccggggacgatatagtcgcggatgggatggagattgttcatcatgaaaagactccttatctgaagcgcactgccagcgcgccgctgatgattctgtgggaataccatgaggttgcccaaaaacctgcaattccttaccaaatatttcattatagtatgagaagacggaaaatgcaaccagagaaatccagggccccgtttcaagatcagcggtggcggccccaattccgtcggcttcaccaaactgagcgcagccgtaagaggaaggtaatttgccgcatacctgtggcagctttgcgtaatttgccggtttggatacgtgccgcaggaatcaacaaatcttgcctgccgcaaaagaaagaagccaaaagccgcctgcacagtctgaacgcaaatgttaatatacgttgcttgcgaaaacaggctgtttctcgtacaatggcgttaaccagaaaggagttcattccctatgttatgtgaaaacatcaaagccatcagaaaatcaaaagggctatcgcaggaggaacttgcgatcaagctgaatgtggtgcggcagaccatctccaaatgggagcagggattgtctgttccggatgctgatatgctgatctccctgtcagaggcgtttgaaacacctgtgagcacgctgctcggagaacctgtcacagcggcgaaggctgatgacctgaaagcggtttccgaaaagctggagatcataaatttgcagctggcacaggggaaggagctgcggcgaaaaacagctcgctgcctgcttattggattgtgtacggccatcgtaattatttccgcagttttcatttactgcgggagtccttatctggggtggaattatcacgatccggaaaccgccgttgttggagtcgcttttcacgcatttgaatggctgtttgtcaggtttgcgccgatgctcttgataggagcaatccttgggattttcctgacacggaagaaggcatagagcgggcctgttttggggtgcaattcagttcccgaaattccagcctgaggggcggaaggcattgcttccacgcctggacaacatgggcagctgtgttccgcggggaaaacagctgcccacgtcttttgcccacgggtggaaacatgaccggctgtgaaggagcggagatccaggcatagtttcacccaaatgacagaagatttccttgttccgtgaaatcacgatcatacttcaaaaggcagaatccggtggcccctgccttgcggcgggtcgcttggtgtggtatcatcagagcagcgcgaggtacaggaggaatggaggaggcccatgatccgaagaatggggaagggcgacctggatgctgtggcggccatctggttggacgccaaccgggaagcccacgatttcatcccagcagcctattggctgggacattttgcagaggtcaggactgcgctggcccgggcggaggtctgggtctttgagacggaggcgcgggccgaaatttcaggcttcatcggacttctgggagactacatcgccggcatcttcgtccggagggaggcccggtccggcggcgtgggtcggcagctgttggaccacgtgaagaccagccgcgggcagctgcgcctgcaggtctaccggaaaaacctccgggcggcagccttctaccggcgggaggggttccgtgtcctggaggagggcgtggatcccgagactggggaagcggaacttcttatggagtggcgatgggacggcccgcagagctgatccgcgatacgcaaggagaatggacataagggaggtgggcacatgacaacggtaacgatccccgctccggtaggggagatcctgaaaacactggaggcggcggggtatggtgcatggtgcgtgggcggctgcgtccgggatgccctgctggaccggatgccgggggactgggatgtgaccacttccgcccggccggaggagactatggccctgtttgccggccgggctgtcccaactggtctgcgccacggcaccgtcaccgtaaagacggagcagggtggcgtggagatcactacactccggcgggatggtgcctatcgggaccaccggaggccggagaccgtgacgttcaccgactctctggaggaggatctgcggcgccgggacttcaccatcaacgcgatggcagcggacctgcaggggaccctgtacgaccctctgggcggccgggcagacctgacggcgaaggtcctgcggtgtgtgggagagccggaccgccggttcggcgaggatgccctccgcatcctgcggggactgcggttcgcggcggagctgggggtcactgtccatccggatacagcggtggccatccaccggaaccgggaattgctgagagccattgctccggagcggatctgggcggagctgaaaaagctggtgtccggaaaatgggccgcagaggtcctgcgggcctatccggatgtggctggcgtcttctggccggagattctgcccatggtggggtttgaccagcggaacggccaccattgttacgatgtgtgggagcacactctccatgccatggagaaagtaaaaccggagccggagctgcggctgaccatgctgcttcacgatattggaaagccaaattgctttacagtggatgggctgggctgcggacacttttacggccatccggcggagagcgcccgcatggcggaggccatgctgggtcgcctccgggccgagacggttctccgggagacggtggtgcagctggtggcttggcatgaccgcaacatcccacgcacccgcccgggcgtggctcgggcactgggggcactgggggagcgggacctgcggcgtctgctggatgtgaagcgagcggacaatctggctcaggccccggcgtaccgcttcctgcagggggagatcgacagggcggaatgcatcctggaccagctgctggtggagggcgcctgcgtatccctgcggcagctggcggtgaacgggcgggacctgctggccatgggactctccggccccgcggtgggacagactttgcgggaactgctgaacgctgtgctggatgactccctgcccaacgagcgtcacgcgctgttggccgctgtcagggatcgggcacaccgaagctgaaggcaacggaaaagagagaagccccggacacacacgtgtgcccggggcttttggtatgaactgggagaaggggaagcgctcagaacaggcgcagctgttccgccacccggcggcggccggtggtctcccggaccaccggctccggcagttcccgcaggaagggagagaactccggcgcggcggtgaggatcagttcctcccgggcccgggtgaggcccacaaagaagagccgccgctcctcttccgcatccgccgggcggccgggggactccaggggcatcgctccggcggagagacccgccaggaacaccgcagggaattccaaacccttggcaccgtggagcgtcatcaggcgcactgcgccggaggcccagtgtttgccggatgcccgccggaggtctgcctcctggcccaggaccagagcatcccagaggctgtcgaagtcctcgtggaataccgccgtgttccgcaggcgttccagggccggagaggtgccgtactgttcctcccactgttccaccagcttccggggtgtttccgtctggaccagagggagccagacctctgtccggtccagccagttttccagaatgccgtggccccggaccgcctcctgcagggccgccgagtccagcgtgcccatcttttggcagagcgtctgggccttctggatgagatctgccgggcagttccacagcagccggagggcggactccagcgccgcgttgtctgctggcaccaccagggaacggaggaagcccagcgccccccgaaccgccgggtcatccaggaagtcctcccgcccggtgacaagacagggaatatcgtcgtggcggaggcatttctccaccagctccagctgccggtgggtgcggcagagcaccgcaatatcggaaaaggcccgcaccgtccgctcgtggcccagggcctgggcctccagcatgtccacgccgccggtcatacggccgatctccttggcgatgaatacggcctcggagaagctgtccgctgcctggaccagtcgcacggcaggaccggcggggcagtggggagtcagtattcggcccccgccgggattatgaccgatcactgccaaggccgtatccagaatggccggagcagagcggtaattttctgttaggtgaatttcctttacaccaggatgctcctcttgaagccgctggaagcaccggcagtcggcgccccggaagccgtagatggactggtccgggtcgccgatgacgaacagctccccgctccggctctaggaccggaccagctggtactggatatcgttgatatcctgaaactcgtccaccagcacatggcggaagcaccgcagaccggtgacatcccgcttcagtccttcggtcagcaggtcgtcgaagtccagggcgcccaggtctcgcagccgggcctgataggcgtcgtacagctccgcgtccagaccggtatcctccggggacacgccgtttttcacccgggagacagactggagcagcgtttttccgccgccctttcggccggactcccgcagcacctgctccgcgatggtcagggcctcgccgggactgatgagccgcacgtcgccaagcagtttcagacagatggcgtggaaggtgccgatggtcatggccgccaccgcccgcttgccgcccagacgctgttccagccgggcgcgcatctctgccgccgcttgattggtgaaagtgacggcggtaatctctccggggcggacgccccgttcctccaccagccaggcgatccgggccaccagggtgcgggtcttgccggtgccggggcccgccgtcacagcggttaccggcgcggtggaggtgacggcctccagctgcgggggattcagcgcctccggctggggagcagccggggccgcttctggcgccaaaacgtgctgcagctcccggcggggcttggatttgcgcacaggcaggtccaggccaaacagagagatctgcccgctgaaccgggcgatctcaccgggggtcagcagggagatgacgccgtactccccgtcaaagcccgcccggcgctccacctgcccggcccgcaggcggcggatgccctccgccacgcaggggccggccgtgtgggcgatatcctccacaggcacctcccgcaggatggagaactccggccccagggcatggagcatctgctcgtacagcgcctgggtattcttcccagcggcggagactccggtggaggcggcgatcacctccggcaggggcgccaaactctcaaagggtttggcaccctcgggacgaaaccctgcaggacggtccgccagggcctccacccggtgctccacgccgatggtcagtttcttcccgcaaacggggcagacgccgcccagcgccgctgtctccgccggggtcaggcagacgccgcagttccggtggccatccaggtggtacttgccctcctcggggaagaactccaccgtgccctggaatccctctccggtgcggatggcccggaccagctccgggtaggtgaggccggtgtccagaagatccgcctcccggcccagcttggagggggaatgggcgtcggagtgggagaccagggtgagtccgtccagggcagagacccgccagttcatgggcggatcagaggagaggcccgtctccaccgcgtggatgtggccggtcagatccccgaagcactcctccatggtatcgaagccggagaaggcgccaaacagagcgaagtggggcgtccagatgtgagcggggatgaattccgcgtccgggcaggtgtccagggtcagctccagcaggtcccgactgtccagccccagaatgggccgtccgtcggagtggatgttgccgatggcctccagccgggcggagagctcgtccgccgcctccagagagggcagcaggatcaggttgtggactttccgggttctgccgtggcgcttgtagatgcagctgatctccccggtgataacgaaccggggcgcctcgcccggggcgacatccggcaggcgcaaatcctggcgcagggtatagacgccctctccggcgggcaccagctgctcccgcagctcggcgcgccaagcggggtgggtgaagtccccggtgcccaccattcggatgccctttcgccgggcccaccagtccaggtgggggagatctccgtccttactggtggcccgggaaaagcgggagtggatgtggaggtcggcaatgtacatggaagtcctcctctgtcgaatcaagtcgattccattataatctcttccatccgacagcgcaaggcggagaaaagcagcccggcgtgttccgccgggctgctgaaaaaatcatttatgggttttgcctgccggagggcatgcgcttcgggacgcgagccaggcgcgggaacactgcccggaacagggaggaggccaggatgaccccaaccgccagggcggccgccatgcccagagtgcccagcagggcgctgaggaattgctctgtgtcgccctccagacagtagcccatggcgtagtagatgccgccgccgggcaccaggggcagcagggccaccagctgatagccggtgacggggcagcggcggatacgtgccatgacttctgagaacagactgatggccatggcggcgaaaaagcctgccaggatggtcttgccggccagcagatacaccagccatcccagagcgccgccacagcaggcaatcagcttgccggggccatggatattgaacaccagagtgaatccgatacagccggcgaaagcacacaggcagggcagaacatattgagaccagatatccataaaagtagatcccctttacagaatatacccgatgcccaggcccacagcggcccccagagcgatacccgtggcgatcagaatagcctccgccgtccggctgagtccggagtaggtgtcgccggccacgatctcccgcatggcgttggtcagggccacgccgggcaccagcagcatcaggacgccgatggtcaccaggtccacattattccccaggcccgcccgcaccagcagaagagacagcagggaggcgatgccgctgcataccagcgtccgcagaaagctgttgctgcccagccatctgccgccaaagagcaggcaggtgcccaccaccagaccgcagaagaaggcgctcaagctgtcccaaaacccgccgccgaacaggggacagaagaaagcgggggcgataccgtagcccagcagcaccgtggcggggcggtggcggcggcaggaggcagggaggcggtccaccatggcccgggcctcgtccaggggcggtacggtacggcagagctggcggcataaagcgttgcagctctccagtagctccagatccgtgccgtgggcactgatccggcgcatccgggtcaccggacggccatcctccgccatcaaactgacaatcaaacagctggggatggcaaacacctgggcgtccttgccttggtaggcctgcagcagccggtagacggactcctccacacgggagatttccgcgccgctctctgccagcaggcagcccagcgatgtggctagattcaacagcttgtccgaatccataaaacgcctcctctcgcctttttaagatatgcgatttttggaaaaaacacaagggatattttgacgaaacgcgccgcgcaggggagcccttgacaaaaaggagcggtttctgtataatcgaatagtccgaaatcggacaaaataagacgggagggattcgatgggacaggaagttctggatgctttctggaaatccaatgaccgaatctacaatgagaataccctgctgtaccaccgtctggcccgggcctgcggcctgccggactgcgccttctggctgctgtacaccctgcggtcggaggaggcgcccctgacccagacccagttgagcgagcagctgtccctacccaagcagacggtgaattccgccctgaaaaagctggtggaggagggagtcctccgcttggaggcggcggacggcaatctgaaaaacaagcgggtctgtctgacagaggcgggcgaggcattcctccgccgcactgtggaccgcgtgttcggcgtagagagcgccgcggccgcccgcctgaccgaggaggagcggtcggcgcttgtggcattgagccagaagctgctggatgcctttcgggcggagacggaagcttttttacagaccgctgcgataggagactgatgtatgcagatcaaactttctgaccatttcacctacggacggctgctgcgttacacactgccgaccatcgttatgattatcttcacctctctgtacagcgtggtagacggactgttcgtatccaacttggtgggggacctggccctgtcggcggtgaatatcgccttccccatcactatgatcatcggcgccttcggcttcatgctgggcaccggcggcagcgccatcgtggcccgcacgctgggggaggggaagccggagctggcctcccgatatttcacgctcttcatctggtgcgtggcggggctgggcgtggtgctctccattgtgaccatcgccttcatcgaacccatcatgcgttttgccggggctagcgacctgctgctggaagactgcatcgcctacggccggatcctgctggccggcagtgccgtgttcatgctccagagcgcctttcagagtttcttttccgtggcggagaaacccaagctggggttactgctctccctggctgccggagccaccaacatcacctttgactacgtgttcatcgccctgctgggcatgggtgtcaccggtgccgcatgggccacagtgctgggctactgcgtgggcggtgtcatcccggtggtgtacttcctgcttcccagaagagagggcctgcggctggtgcggacgaacttttacggccgggaactgcttcacgcctgtatcaacggctcctcggagctgatgagcaacatctccgcctccgtggtgggcatcctctacaacatccggctgatggaccttctgggagagccgggcgtggcggcccactcggtgatgatgtacgtggatttcgtgtttgtggctgcctttctggggttctccatgggcagcgcccccatcgtcagctatcactacggggcggagaactatgatgagctgaagaacatcttccgccgcagtggcgtcatcatcgccgctacctccgtggcgatggtggcggcgtcggagctcttaagccggcccctgtctgctgccttcgtggggtactctccggacttgctggagctgaccacccacggcttccggatctttgccctgtgctaccttttctgcgggctgaatatctacgcatccgccttcttcacggccctgtgcaacggcgccctgtcggccctgatcgccttcacccgcacgctgctgctgcggggtggactggtgctggtgatgccggtgttcttcggcgtggatggcgtctggtggtccgtggcggcggcggaactgctgggggtggtgctctcggtggtgctgctggtgctgatgcggcggcgttaccattacgcctgacgggggaaaacgcggatatgttacaagacggcggctccgctcaggtggtatgctggctggtgccgacaggagggaagaaccatgagacaagcggcgcggaccgcccgatatgaccaggctctggggctggaggcgtacagcctccgggcggtggacaggccctttcccagccactttcacgaccattatgtgatcggcgtggtggagcgggggacccggaccctcacctgcggccgccaacggcaggtcatcggcccgggagacgtgctgctgttcaacccgggagacagccatgcctgcatccaggcggacgggtctctggactaccggggactgaatatcccacgcagcaccatgctggccctggcggaggagatcatgggcagccgggcaatgcccggcttttccgtggccgtggttcgggacggagaactggcaggccgcctccgggccctgcaccgggcggtgctgggggaggagccggagctccggagggaggaggcgctgctgctggcctggggcctcctgctgccgggttacgccgggatggtggaaacggtttctgcctgccgggtggaggtggagcggacctgtgcgttcatccggagccactatgcccggcatatcacgctggaggagctcagccttcaggcgggactgagcaaatccgccctggtccgggcctttgccaaggccaagggcgtcacgccctaccgctatctgatggcggtgcggatcagcgaggcacggcgcctgctggaacggggtgtctcctctgcagaggccgccgtggagacaggcttttccgatcagagccatttcaccaactatttcactgccttcaccggcctgacgccgggggcctgccgggagctgttccggcaggaatgggagagaggatgacacagccgtggagacgaatcctgcacggggccacctggcggccctgctgaccattgtgatctggggaccaccttcatctccaccaaggtgctgctggtggatttccagccggtggagatcttgtttatccggttcatgatgggctttctggcgctgctggcagtctgtcctcgccgcctgcagggcgtcacacggcggcaggagggattgtttgccctggcggggctgtgcggcgtgtgcctgtactacctgctggagaacatcgccctgacgtacaccatggcctccaacgtgggggtcatcatctccgtgtctccctgcttcaccgccctgctgacccattttctgatgcggggcgaggagcggctgcggcccacatttttcgcaggctttgcggtggccatggcggggatctgccttatcagcttcaacggctctgccctggagctggacctccggggggatttgctggcgctgctggctgccttcgtgtgggcctgttacgccctcttgtcccggaagatcagcgccctgggccatcccactgtcctgaccacgcggcgaacctttttctacgggctggcattcatgctgccggcgctgatggtctctggcgtccggctggagctcacgcgactcacagccccggtgaacctggggaatctgctgtttctggggctgggggcctcggccctgtgcttcgtcacctggaacttcgcggtgaaggcactgggggcggtgaaaaccagcgtgtacatctatctggtgccggtgatcacagtggcggcctccgtgctgatcctgcgggaacccttcacctggatgaccggagccggtacggtactgaccctgatcgggctgcttctctctgaaggcaaactccattggaaagagggaacacaccatgaaacaggaactggacaaatgcgtcctggtgattgatgaggccatgccccggggcctcgctgccaacacagcggccatcctgggcatcacatggggccggctgcggccggaactggtaggggaggacgtgaccgacgctgccggagccatccaccccgggatcatccgcacgccggtgccggtgctctccggcaggccggagacttttcagaccctgcggcggcagctggccgagctggaatttgcagatgtggcggctgtggactttacagatctggcccagagctgccgtacctacggcgagttcatcgaaaaaatggcccgcaccgggccgggggagctgcgatacctgggcatggcccttttgggcccccggcatcaggtggaccggctgaccggaagcctgccgctgctgcggtagggaaaaaacgcaggaatggggccgcgcccggttgcggccccattctcgtatcatttcccggaggacttatggcccctgctggatcaacagatccacctcagcatcaccgccattggtgtacaaatagctgcaggcaaagccgttcacttcccagatggcatacgacatactatcgtattggtagtatgcgacgctgacgcccgcaatctctctgctctcctccagtgtgccgccgtagattccgctgatgtctccactcccatactggatacgaaactgggagccgtccgcatagtccacctgtcccatggtggggtacccatctgagatgaacacggagtacgcctccacctctttctccagcacagggaccttgaagtccagatatgcttccatctctgcggcggacgcgactgtgaggatgggattcgggatttgaacctgctgaggatccggggcagcgcgccctctgccctgaatcagcagtgccccgccggtggccagcaggcacaggcaggccgccgcggcgccccaccggacccaaaaggactgcccgtgctttcgcctgtaccgggcggcctcttccacatacctgccgtcgagcgcactcagagcatcggaaaacttctttgcattcataaaaacgcctctctttctgccagatattgtttcagcttccttcggatccgggccagccggacggagatatttttttcgctcagcccgacaagcccggcgatgtcccggcagctgtcagaaaaccagtagcgccgcatgaagattacgcggttctctgcggacagcgtatccaaaaagcacgcaatgacgcgggcgagctcccttgcctccacctcttcctcggcgctctttcggtctggaagacactcctcgacttcctgcaaagcaagggtgtaaggactgtttcgcttggcagcgccctttttccaatagcacttcagggaaatgttgcggacgatccgcgccatatagggcagcagagagtccggttttgccgggggaatggcattccatgcccccaggtacgcatcattgacgcactcatctgcgtcctgcctgtcattcacgatgtgataggagagactgtggaatagttttccatatttcgcgtccaatgcctcgatagcctgttcggaacgtgcaaagaacagtgtgatgatctgttcctcatccatggttgctccacctcctttccggtttcactttgtacactacgtttttttcggcaaatcctacaacagattccagtattttttcaatatacgatcatgcggccatacggccggaagagaagcggagaaggccgcagttccagctgcgtctgcggaaaagacaacattgcatcccaggtgacaaaccgggggaagtgtggtaagatattccggtatgaaaatttctgttccccaaggagtcctttatggaaaactattttgaaccgaatctcaccgacgaccagctgcgcgctatcagttccatcggcctggcccacatgggggacgccgtgttcgaggtgctggtgcgcacctggctctgtgcccatggcaaggccacgggaagggggctgcaccaggccaccattgccctggtgcgggcggagagccaggcggagaaggcggagcggatcctgccccttttgacggaagaggaagccgctgtgttccgccgcgggcggaacgctcacgtgaagtcggtgcctggccatgccacccgggcccagtacggcgaggccacggccctggaggccctgttgggctggctgtatctgaagggccggcgggaccggatcaatgcgcttttccgcgcgatgatggaggagtaagaccatgccattggatggaatctgtatgcaggcggtggcggaggagctgcggtcggaactgctgggcctgcggatcgataaggttcagcagcccgcccgggaccaggtgatcctgctgctgcgggggaataagcggctgctgctgaacgccggggccaacactccccgcatccagctgacggccctgacaagggacaacccggcggagccccccatgttctgtatgctgctgcgcaagcatctggttgggggacgggtggctgcggtcacccagccgcccctggagcggctggtacggctggagctggacgttactgacgacttcggtcagccggggcggcggaccctggtgctggaggccatgggccgccggtccaacctgatcctgctggatggggagggccggatcatcgactgcctccgtcgggtggacgcggacatgtctgctgcccggcaggtgctgccggggctgtattatgagccgcctgcctccgtaggccgcctgccggtgacggaggagacggagaacggcttccgggagaagatctccgccgcaaacccggagcggagtgtggacgcctttctgctggaccactacttcggcatctccccctgatcgcccgggaactggccttccgctccgtaggggagacggatgcccatctctttgacctgggagcggtgggagaggaccgcctctggaaggaattgtccgggctcatcagagatatacaggaaaatcactttacaccaatctgcctgaaaaaagatgggaagatggcagatttcacctactgccccatcgcccagtacggccctgttatggagaccgtccggtatgacactttttccaccctgatggatgacttctacgccctgcgggagcagcaggagcgggtgcgtcagcggggggcggacctgctgcggactgccaccacggcacgggaccgcatccggcggaaactggccatgcaggagaaggactacgccgccacacagaaccgggaccagctgcggatctacggtgacctgatcaccgccaacctctaccgcatggagcggggggcggccagattggagacagagaatttctatgacccggagtgccgccctgtcgccattcccctggacccgctgctgacgccccagcaaaacgccgccaaatactacaagcgctacaccaaggccaagacggcggagaagtatctggcggagcagatggcccttgcccgccgggacctggactatctggagagtgtgctggaggagttgagccgggcagagacggaacaggactttttggacatccgcggcgagctgcgggacgcgggcttcctccgccgacagggaaaaaaggaacagaaccggcctgcaaagcctctggagttccgcaccacctccggcttccgggtgctggtggggcggaacaaccgccagaacgacaagctgacccgcagcgcggaccaccgggacatctggctccatacccagaagatccacggttcccacgtgatcctctgcacaggcggccgtgaggtggacgatgacaccatcgtggaggcggccaagctggcggcctggttctcccaggcccgggagggtgccaacgtccccgtggactacacaccggtgaagaacgtgaagaagcccgccggtgcccggcccggcatggtgatctactccacctgccgcaccgtgaacgtggcgccggaggaggggcttgtgaagaaacttcaattgtcataaaaaagttgttaaaaagaagctgcttgttggtcaagcagcttctttttctttcaaaatatccaaaaacaggaatcttttttgtgcagaatggctcttgcaaaacgggagcaaaggtttacaataaagctctcctgaaaacgggaggcaatcagtattcagacctcagaaagcgagtgagaggcaatgacgtatcattatctcatggacctggcgctgatcctgttgagcaccaaggtgctgggcatcctgacgaaacgcatccagatgccacaggtggtgggcgcactggtggccggactgattctgggcccggctatgctgaacgtactatcagaaacggagttcctcacccagctcagcgagttgggcgtgatcgtactgatgttctccgccggcatgggcaccgatatccaggagctgaagcacagtggcaaggcaggcttcctggtggccctgctgggcgtgatcgttccactggtcctgggtacggggctggcgatgttcgctgaccggaccggcatgattgagaccagcggatttttggaggatgtgttcatcggcaccatccttactgcaacttccgtcagcatcacagtggagacactgaaggagatcggcaagctggataccaaggtgggcaacaccattctggcggcggctctgatcgacgacgtgctgggcctgattgccctgaccatcgtcagcagcctgtccggcggacaggacagcatcgccctggtgctgctgaagatcgtgctgttcttcgtgttctccgctgtggtctccttcctcgcccacaagttcttctgctggctgatggccctgtggcccggccgggagcggcgccgctatccggtgctggcctttgtgctgtgccttctgatggcttactgcgcggaggagttcttcggcgtggcggacatcaccggcgcctatgtggcgggcctggtgatctcctgcacccccaagtcctcctatatccaatccaagttcgagccgttgagcttcctgctgctgacgccggtgttcttcgccagcgtgggcatcaaggcaaaggtggacggcatgaccggcagcctggtgctgttctccattctcctgctgctgatttctgtggccaccaagatcgtcggctgcggcctgggcgcaaagctctgtcatttcactggcaaggagagcctgcaggtgggcgtgggcatggtctgccgcggcgaggtggcgctgatcgtagccaaccggggtctggagctgggagtgctgtccgggaccctgatggcaccggtcatcatcaccgtggtgggcggcacgatcctcacacccatcctgctgaagctggtattccggcacgacggacagccggccagcgcggcggacagcaatctggcagaccactatgagaagatggagcagctggatatcgtctccgcagagcttctggccagggaccagaaatacctgaaagaaggggagcacggcggagacaaggaccgcggctgatctgctccggtgactgagaaccgcaaatacggggagccggccttttggtcggctccccgtattttgaaaagcgcgctgtatccgccgtcaggcggtgtggcgggcgtggcccgtctcctcgtcggaggagcggaacaacagcgtgatgcaccacaggcccgccaggcccaccagggcgtagatgatgcgggagagaatggccatctggccgccgcagaggaaagccaccgtatcaaagccgaacaggccgatcccgccccagttcagggcgccgatgatagccagtgccaatgcgatcttatcaatcaccatgcgaaaaacctcctttatgccttccagcagggatttggcgttagtgtatccaacggggcgggaactatgcggatggggaaaatttccagcctggacaaaatttgcaaatcgcattgcaaaggaaagatagggattgtataatcgaaacagcgggatccgatctcgcccgcggcgaagccgcgcagaccgattgataaggggagacagtatgaatattgtatgcttggatatggagggcgtcctggtgccggagatctggatcgcattttcagaggccagcggcattccggagctgcggcgcaccacccgggatgagccggattacgacaagctgatgacctggcggctgggcatcttgaaggagcacggcctggggctcaaggagatccaggacaccatcgccaagattgatccgctgcccggcgccaaggcgtttttggacgagctgcgggccaccacccaggtgattattctgagcgatacctttgaggaattcgccaagcctctgatggaaaagctgggctggcccaccatcttctgcaactccctggaggtggcggagaacggcgagatcaccggctacaagatgcgctgtgagaagtccaagctcaccacggtgaaggccctgcagtccatcggctatgacaccatcgccagcggcgacagcttcaacgatttggggatgatccaggccagcaaggcaggcttcctcttcaagagcacggagcagatcaaagccgaccacccggagattccggcctttgaggagtttgacgacctgctggcggccatcaaggcggcgctgtaagagttttccggaaagaaaggggacgcgacatgaacgagaaattccagaagctgggcttttacccggcggatatcctgctgcccaaggatgcggacatgaccaagtgggccgtggtggcctgcgaccagttcacctcccagccggagtattggcaggcggtggaggagactgtgggggacgcgccttccaccctccggctgatcctgccggaggccaagctgaacgacccggatgtggacgcccatatcgcggacatcaacggcgctatgaaccgctatctggcggagggcgtctttcagaccctgccggggtccctgttctatattgagcgcacgcagtccgacggcaaggtgcgccacggcctcatcggcatggtggatttggaccagtatgacttcacccccggctccggcgccctgatccgggccacggaggggacggtgctctcccgcatcccaccccgggtacgggtacggcaggacgcccccgttgagctgccccacgtgatgctgctgatcgacgacccggaccgcacggttattgagcccctgaccgccgccagcggggagatggagcagctgtatgactttgacctgcagcagggcggcgggcacctgaagggctggaagctgacggacgcccagatggacgccgtggcggacgccctggcggctatgtgcacgccggaggccatggagaaaaagtacggcctgaaggacgcggcacctctgctgttcgcggtgggcgacggcaaccactctctggcaacagccaagcagtgctatgagaacctgaagaaggtcacgccggaggaccagtgggccgatttgcccgcccgctatgctctggtggaagtggtgaataatcacgacgacgccctccagttcgagccgatccaccgtgtcctcttcggcgtggagcccgaacaggtgctggaggcgatgaaggccgcctatcccggcgcccacgaaggggagggcgagggccacaccatcgcctacacctatgcagggcataccggtaccatcacggtgcccaatcccaggatgcagctggcggtgggcacgctccagaccttcctggacgcctatctcaaggagcacggcggcgaagtggactacatccatggcgacgaagtgacggacgagttgggcagcaagtctggcaacatcggcttcaagctcccggctatgggcaaggaacagctgttcaagaccgtcatggccgacggcgtcctgccccgcaagaccttctccatgggccacgcccaggataagcggtactatgtggaggcccggaagatcaagtaagaagtcatttccacagatacagacagcgccgcaggcttttgcctgcggcgctgtttcttctgaaacctggcaaaagccgcgggaccgccgcggcttttggggagagcgtctttttaaaacaggcccctccgcctccggaacttctgggtagcttcatacgcgaaacagagcagggcgagggacaggattgtgatggccggcaggagcagggctgcgtacagcaatgagcttctgctcaaaaacaggatgtccagcatacgatgctcttttctggtgctgttgggggggattgcccaaacaattcattccaccccctctgtgctgcgtataaatgcaccgcattctgttaaaaaagaaagaagatttgtgaaattttacatgacgccgggcattcgttcaaaaggcagaatcccggtcgatcacgttccagtgagaggcggagactgtctgcccatccttgcactccagctgcacttccaaatgagaataaaggctggtggggagctcccagcggaacagggcgaaggtccggccgttccggatccgccggacgccgatctgctgccgctcctcggccactccggtgccggtgggatacagaaacaaaactacctgatccaccgtgtgctcccggccgtcctgaaaggtgaccgccacgttcacggtgctgtctggcggaaacagataccagccgaagtcgcttttggcgatctcctgcccggccgcatcatagaaatagacgcctgtaatctgcggatcctccggcggcggccagccgtcctgatgcgcgctgtaaaggatccagcccagcgccgccagcagcgccaggcagaggagccctgccgccagcgtcagccgcttccaccgccgcagagggacgggcggcgctgtttctctttccacttgaaggtctgtccccaaaatctccgagagcgcccgccgattttccggagagggaacagaggttcccatctcccacttggataccgcctgccggctcacgcccagccgctccgccagagcctcctggctcatgcccaagcgatcccggccttcccgaatcgccttgctcatgtccatgacgcaccgcctcccgctccgctgctctcagcatagcaggtttttccggttgcgtccaccaactttccgcaaccgtccggttgcgggcgattcattgtttctacttggggagggatgtgctatactggacccagacagcgggcggaggcccgcgggaggtggtgcgatgaagactttgacgctggaggccccggccaagatcaacctgactctggatattctggggcggcgtacagacggctatcacgacatgcggatggtgatgcaggccgtgtccctgggggacaccgtgacggtggcagaggcggcgggcggcttttccttgctgacagagggcatctcccttccggcggggaaggtcactttggagcagcgggcggcggatgcctttttccacaggctgggccgcccggtgccggggctggaggtacgccttgccaagcgggtcccggcttatgcggggcttgggggcggcagtgcggatgtggcggcggtgctgcggtgcctgcggaccctgtacgccccggatctgccgcggcaggcgctggaggagatcgggctggcagtgggcagcgatgtgcccttctgcgtccggggcggcacatgtcttgcagagggacggggtgagctcctgacggacctgccgcctctgccggactgtgccatcgtactgtgcaagccggacttcggcctgcccacaccggagctgtttgcccggctggacggggcggacctgggcccccggccggatacggcggccatggcagcggcgttggcccggggcgatctggccgccgcggccgcctgccttggaaatgtttttgagcgggtgctgacggaggaggaaggggaggagatccgctccatcaaggaagccctgctgcggcacagtgctctgggcgcggccatgagcggttccggccccacggtgttcggcctgtttgatgaccggcagaaggcggtccgggcaaaggaggcgctggagggacgttaccggcagacgtatctggccgcgccggtaaaaatattggaaaagatggaataaaatccggaatttccgtccatgatgggggaaacgggccccatggggctacatagcaaaggacggaaaacggatatgaaaacagctgcaaagcgtgagcgaaagactctgcggatcgtggaactggccctgctgctgggtgcggcggcgtttctgatgaccggcgtctgggcgctgaacacccagcgggacctggcggacaaggtggtgcggctccatgtgctggccaactctgatacggaggaggaccaggcactgaagctcctggtccgggatgcggtgctggagcgagccacggagattctggagcagtcggcggaccgggcggaggcagagattcgcctgcgggagagcctgccggaactggaggccatcgccgaggagacggtacgggccaacggctatgactacgccgtgacggcggagctggaggacacggcctttcccaccaaggaatatgacggcttctctcttccagccggggagtatctggccctgcggattctgattggggagggcgtcggacagaactggtggtgtgtggtgtttccgcccctgtgcaccgctgcctccgcggacgtgccggagacggccctggccgctggcctgacggaagaccaggtcagcctgatgacggaggaggatggcggctaccagctgaaattcaaggccgtggagctgtgggagcgcctgaaggcggcgctggagtgagcgggagccgcccttgacacggcccgctgggaacggtatcataagggccgggaccggactttcctgcggccccacggcggggagcggcggatggccggatgctccgcactttccagcggggaggagacggcggcatgagagaggcggaactgaatcggcagcgggtggtgttcacaccgcaggaggcggcgcgcctgcctcaggaccggccctatgcggcgtacatctgccactatgactgggcggagggagagcacgccacactgatgcactgccacgagcgcctggcggaggtgctgctgatcctgaagggcagcggccggtacaccgtcgatctccgccggtacgaggtggcagccggagatgtggtgctgtgcagcggcggcgccctccacgacgaattcccccaggcagaccagccgtatcagaccctgtgcgtggccatcgggaacttggcgctggcggacctgccgccatacagcctgctttccccggaccgctgccccctgtttcaccagccggagcagtttgcggacctgaaggagctcttctgcctgatggaccggtatgcagcggagcgggagccgggcttccaggagctgtgccagcacctgatgctggcgtcgctggagctggtccggcggatggcggcggggcggaaggaggatctcgtcacccgggaggactccaccttcggccgtgtggccagatacatcgaccgccattatgcggaggacctctccatcgagcagctggcccgccagttttatctgagtccctatcatctgtcccatatcttccggcagaagacgggatacagcctcaagcagtatgtcctgcgccgccggatcggggaggctcagatgcggctggtgaacgcgcaggacagcgtccagaccatctccgaggcggtgggattcgcggacgccagctacttctcacgcatcttttcaaaatacgtcggcctcacgcccacggagtaccggaaattccggatcgggccgtgagaccgcagaaaagtccggaaaaaagacctgcggagggaaccgtgccgttccccccgcaggtttgtctatttcattccgtcaggtatatttgtatactttgtccagcatcctaagcagaagacggatgaatagggaggagatccagatgaaacggacatggaggaagaagatcggcgcagttgtggccctgctggccgccgtggcagtgctgggtaccggctgcggcgcggacgccgccggggctgtggagtcccggaccagggagacgagggctctgggcctgctgctgtctagggaggatacgtttttgttggagctgaaggcggacatcgaagcggaggccgccgcccagggctacgcggtgcggtattacaacgcgggcaacgacccggagacccagctgcgccaggtccacgaggccctggcagaaggcgtggagaccctgctggtgaaccttgcagacggggaggactccgaaaaggtggcagacatcgtgggcgacgcaggggtcgtgctgctgaaccgggcgccggggacggcgatcctgaacgagcggatggtgtttgtgggcatggacgaggccgggagcggcgccctccaggggcacgccctggcggagtatttctgggagacggaccacgggacggatatccgctatctgctgttccaggggatgcccggccaggagaatacagatgcccgctccggcaccgccgtgcagagcctgctggacgacggcttctgccccatcgccgcggcagattaccaggtctgcggcttcagccgggagcgggcccgccaagccatggcggccctgctggagcagggcgtggactttgactgcgtcatctgcgacaacgatgaaatggccctgggagtcatcgaggcgctggaggccgccggctgggatccgggcgcggcgcccatcgtcagcgtggaccacacggcggagggggccgccgccctggagagcggcaagctctatatgacggtggaccagaatccggaggaccaggcccgggcggcggtggcggcagccgtcaatctggcccggggtcgggcctatgacgacgggctccgggagctgctggggaacgactgcacggacccggagcagccctttgtactccgggttcctgtggaggcggtgaccgcttgacgtactgccttgctttgccggagtgcagaaaagcctgtgttcagaaggaacacaggctttttcagcccagaaggtactgcgggacgggcgccccggcatgggatcagacagggaacggatgcggaacgcgggctgcacagcatggattccgcacttgaacgggcatatcccgaatcggcatgcgcgatgaaaggcgggtgcgcaaaaccagctgcaaactcccactctgctccgcgtgcggataccatccgaaaaaatttcagattttttcacgcttgctcttgactttgagtgtactccaggtgctatcctataaacgtgtcggatgaccgatgcgcaataccacggctgccggggggctgaagagatgcatgaggaatttcaaacggtcctgcgggagcacctggcccgctatccgctgatggagccccaggactgcgccaagctggcctatcagagtacgttcggtccagcccatgcagcgggggaacggggagatgtcctccggcagctgctgggggagtgcagcgcccttcccgcagaccgggaggcccggccgccggagcggatcgggaacggtttgtgccgcgttcatttggcggggacgggggattggacgctggctgcgccgctcctggcggatctgctgcttctgacggcggcggagcaccacgggacggcggcggacctggaggaatgcctgaccgcggcggaggcgctgcccctgcccggtatggcggactggctggcggtgtaccgccgtcagggctgtccgcccgtccaccactcgccggcctaccgggaggcgtatgacccccactaccgggtcctgcggacagcatacggcgggtacttcccggcactgctggcggcggcccggctggcgcggagcggcagaccagccgtcgtggccattgacggccgctgcggcagcggcaagagcggcctgggagacctgatggggcggctccttccctgcaacgtggtccacatggacgactattatctcccaccggaccgccgggcagagaactgggagcagatcccggctggaaatatggacctggcccgcttcctgcaggaggtactggtgccggcaggggccggagcgcagatccgctgccgcccgtatgactgccggagcggcacgctgagggaggggacaacgcttccggcccggcccctcactgtggtggagggaagctactcccagcacccgctgctgtcggcccgctatgatctgcggatgtttctcacctgtgcgccggaggagcagcgccgccgcctggagcggcgggagggcgcccacttcgccgcctatgagagccggtggatgcccctggaggagcggtatatccgccaatgcggcccggagaagggctgccagctggtgatcgacaccaccgaatttttcccctgacgaggggcaagtccctgaaaaacgcccggccagaaggccggtattcacagccctgcagactccgtaaaaaaagccagaaggctggtgcggcgccagaaggcggcgcgaaaagactttttgagaaggagtttaaccccatgaaacacagcaatttcaaaacaaatgtccataacctggtcctggcggccatgttcctggccctggcgctggtactgcccttcctcaccggacagatcccccagatcggcgggatgctgctgcccatgcacctgcccgtgttcctctgcggcctgatctgcggctggcggtatggcgcggtggtgggattcgtggccccgctgatgcggatggcgctcttcggaatgccgccgctggtggccgctgtggccatggcctttgagctggcggcttacggtggcatcgcgggctttttgtacaatcggtcccgctggcagtgtgtggtggccctgtaccgtgctctgctggctgctatggtgggcggccggatcgtctgggctgcggtgcgggtggtgatgaccggcgtggccagcgtgcctttcacctggcagatcttcctgaccgaggcgctggtgaacgccattcccggcatcatcctccagctggtgttcattcccgtcctgatggtggctctggaccgcaccggcatggtccgcttccgccgggagcaggccggtacccaggccgccggaaactgactgatcggcggcttctttcgcaggcagagcaggcccccggcggaccggacacgttccggtccgccgggggctttcacatgccttgccgcccgccggctcaccggagccctccaagctggggagccggctctgcgctgccgggaatgtctggcgcggcgcccggatcgttccagcatattttgccggatgcactgcggcccaatagatgcggctgatgtgccaggcatttccagtcatctggaaaatccggaaagcccttgcgtggctctgccccgctgtgttaggatgtgaaccgtgcttttgaggccggattttccgctgcctgcttggctttttgacagaatccgcaatgatttggcagaatttctacatctgggaaggccccttttcggaccggacggagagtgcccgcttcaaagcgccgatacctacaaaccaatcgggaggaatctacacacatgaagcgagaacttgttaccggactgctgactctgagcctgctggcctccatgctgccggccaatgcccaggcggcggaggggatgtttggtgcgtctgccgccgggcaggtccagaccatgacggagggggccggggaggacggcgtccaaacggaaaacaccgcggatatcgacggcacccagtatgccaccctggcggaggcggtggcccaggcggaagagggcgccaccatccggctgctccgagacgtggagctggacgcctccggcctggtcaacggccagggagcgctgacgctgtccaaggacttgactctggacggcagcggccataccatccgggcgaaggcgggcacattttctgtctccggcgacaatggcaccggccccagcctcctcaatcttcaggatggcgccgaggtgacgctgcgggatgtgacccttgacggcggcagtgccgccaagcacggcctgaacatctaccacgccggaatggtgaccctggagaacgtggagatctccaactgccgctggtacgccctggtggtcaatggcacggagctgtccgtggacggcctgaccacctccggaaaccagtggggcgtcaacatcgaccggggcagccgcgtcacctttgcgaacgctgctattgccgagggggattccattgtctttgaggggcaggatgcctccggcagcctgaccgtggagagcggcagctatcagaatatcaagacgcagggcggctccactggcggaaccatcgtcatcaacggcggcaccgtgggcagcgtagtcaacgacaccgcggcggagatcaccatctccggcggcactgtgaccggtcaggtggccaacagcggctccggcagcatttctgtcaccggcggcagctttgccactgcagagctggaggatttcattgacccggaccggacgatcatcctgaccctggagctcggcgagggcgccgccggcgcggccgccatggcagccaccagcggcgcagccgtggggacgcttcccacgccggagcggagcggctacgccttcgcgggctggtacaccgccgccgacggcggcactgcagttactgccgataccgtcttcgacgcaaacacaaccctgtacgcccggtggactgagaagtccgaggacggcgagcatctcattactgtggaccaggtcaccggcggctccctggaggtgagtgccggtcgggccgacgagggtgagacggtgaccatcaccgcggcgccggatgacggatacgagctgaagaagctgactgtcaccgacagccaggacggcgcagtcccggtccagaacgcgggggaggggcgctataccttcgtcatgcccggcggcggggtgaccgtgtccgcgtccttcgtccgttccggggagcagacggaactgcccttcacggatgtggacagcggcgcgtactattacgatgcggtccggtgggctgtggagcaggggatcgcctccggtgtcaccggaacggccttcgccccgggccgcggatgcacacgggcccagcttgtgaccttcctgtggcgggcaaacggctctcctgagccgtccgaaaaggagaatcccttcacggatgtgagccccgacagctactactataaggcagttctgtgggctgtggagcagggcatcacctccggcgtcaccaagactgcctttgccccggaccgggtctgcacccgcgctcaggcggcggtgctgctgtggcgggccgagggctctcccgcagcatccgggacgcatgacttccgggacgtggcggaaggtgcgtactatgcggacgcggtggcctgggccgtggagagcggtgtgacccagggcaccacttccactacctttgagcccggcacgacctgcacccgggcgcagatcatgaccttcctccaccgcgccatggcgtgacagagagggccccaggacagatgcaggcaggtccggctgaatcgcccggccaggacgcagcccatgtcaaacggcgggccgcgcggagattctccgtgcggcccgccgctctgcctttcaaggaacttaaaaaaataaggagaatccgcagcatctctggaatttttccgtctgttgggatagaatggaatcaccattccggaaactgccgacaatggagggacgaatgatgaagaagctgttttctttgacgctggctatggtgacggctctggggctgatgctgccggcgtccgccgcagaggagaccacagacgaggccctggccagggtgacccaggccgtaaaggcggccctggatctggacacggatgcctatgacgaatttcagggcagctggtatgaggatggtctgaccggtgcctgggatctgtactggtcgaccgagttggaggaggaactgtccatttccgctctggatgacgggaccgtaatcagctacgatctgggtctgccgtacaccgcctccaacagcggggatttcccggtctttccccagggggatgaggccgcggccgcccgggccgccggggactttttggacaaggtcctgcgggagggggagagcgtgaagctggaagagccccgcggcatggatattctgggcggggacagctaccgctactccggagtgatcctgctgaacggcctgccctcgccgctgacctattccatcactgtggatgcggcggacaaccgggtccggtctttccaccggaccacagcggaggacaccttcctgggagacgtcccctctgccgccgctgcggtgcgccgcgaccgggctgccaaactcctgacggataccctggagctgaagctggaatacgtgcgggaggcgggcggcacgtcggccgtgctccggtatctgccggtggatacggacaccttttatgtagatgccgccacaggagcgcttttgaatctgacggagctggaggaccagatgggcggctggggcgccggaggcagtgccgacaacaccgcggctgcggagagcgaggacagcggcctcagcccggcggagcaggcgggcatcgcccagatggagggcgtccggtcctccgcgttcctggaccagagcctgcgggcagagccggtctacggcctgacggagtacgccctgtcctccgccgcctaccgtctggcggaacaggaggggaaggaggatcaggtcctctgcgtcctgtcctatgtgcggcccggagaggaggacagccgttcccgcaccatcacagtggatgcccgcaccggcgcggtccaggaggtattctcctacgcacccggaatggaggagggggagacaccggccctgacccaggcggaggcgcaggtcaaagcggagacgttcctgtccgccctctgcggcgggcggtggagtgccctgacactctatgacggccgagacaacacggaggaccggcgtccgtactacaccttcacatacgtccagcaggtaggcggcattcccttcccggagaaccgctataccgtggccatcgacagcggagacgggtccgtgtaccggctggattatcagtacgacgaggatgtgacgttcgccggctccgccggtatcgtgggtgagacggcggccctggccgcctgggcggggacctatgacacggtcctggcctaccgtctggtgccccgccctctggagagcggcgacgagacggaagcccggctgatggagctggggcttacccacttctacgagctgcggctgacctacgctctggagcgggaggagcggtatctgggcattgacgccgccaccggcaaaccggcggcgccggagtccggggataccgccatcacctatacggacctgtcgggctccggggtgaaagccgatgtggagaagctggcccgctatggcgtgggctatgacgggggccgcttccggccggacaaacagctgacccagtgggatctggtggccctgttggccagcctggagggatactgtatcgacccggagacagcggatgagagcacgcgggacaccgtctattccgtggcctaccggatgggtattctgccccggggaacccgggatgaaggcagggccgtcacccgcgggcaggcagtgaaatgtctgctggactgcgcaggttatggtccagccgcccggcttcagggcatctacacctgcacatacagcgacgctgccgccatcccggaggcagacctgggctatgcggccatcgcccaggcgctgggcatggtccggggaagctatcagggggaccggacagccacccggggagagctggccgccatgctctgccgcctgctggagcggcagggagcaaacgcgggcgcctgaacgggcccgccggatgatggaatttgggaggaattacacatgaaaaacgtattcggctatccggagtttgacgcggagggcgaggaaatcctctgtacctacgacaacgcatacagcgatatgctgatggacatccgggtctaccggatggaacccggccggaagagaggcttttgccgacggggcgaggagaccgcggtgctgcttctgtccggaaccgtgaccttcggctgggagggccggacggagacggtcagccgcagagacgtgttcactgacggcccctatgccctccatgcctgcgccggggaggagatcaccgtggaggcgcagacagacgcggagatcctggtccagtgcacgaagaatgacacagcgttctccggcaggctgtaccggccggaggacgccccctgggtctactcctgcgtgggcaagttcggcaatgtggccaagcgccgggtaaacaccatctttgacaaggatatcgccccctggtccaatatggtgctgggcgaggtgctgaacgaccgggggaactggtccggctatctgccccaccggcacccccagccggagtgctattacttcaagttcgaccggccggagggcttcggcgccagttttgtgggggaccaggtattcaagagcgtggacaacagcttctccgccatccccggcgggtgcctgcatccccaggcagtggcgccgggcttccagatgtatacctgctggatgatccgccatctggacggcaacccctggctgcagaccacccgcaacgaggacgagcgatatctctggcttcacgatgcgcaggagtgacctgcccacagagagttgaacagcggaaaaaggctccgggtttctctgggaacccggagcctttttatttggaaacaggtccggcacagtggtccggttccagaagaggcgccgtcccgggacctgcctgggacagccggagcccggcgccacgcacatggtcccgcagcacttggtctacaaagcggatcagctcctccggcgtgccctggatctcgcccaggagccagtcctccacaatacttaccagcgcgcccacatagaactgagtcagcatggtgagctcctgctccccggcctcataccccagctccgcggcaatcagacggatcgtgctccggatgatggcgcggatatccgtctggaagaaccgcttcaggtggtcccggcccatggagcgaagggcgcagaggcagaacacacggttctcctgcaggtattggaaaagctggagcaggccgtcctgccacagcatgacgccctcgtgttcccggagcagcgccaccgcctcctcctcaaagatccagcgcaccgcgtcgtagacatcgtcaaaatggtagtaaaaatgctggcgcgccatgccgcagccccgcatgatctccgccacggtgatcctgttcaggggtttctgggtcatcagctccttgagtacagtgcagatctgccgcttggccgcattgctggcctcgtatgtccgttttttcatatcgacctccatggaccggcagactccagtccattgcagtccagtataacacattttccagaggagtgcatctatgcagaatgggggcaagtgtcagatttctgacatctgcccaaggtctgcaccttgcatctccgggcctgtttccagtatgctggaggaaatgcggaaaggagcggaggaagatgcgggaagagtatcacgtcacgctgtacagccagatgggccccagggagggtcgcctggacctccaatacgagggttctgccgtcacaggatccctggaactgatgggacgccgcaaccccgtccatggcgtacggtcggaggatgggcatctgtgcctctctcatgctatccggacggcggtcagcacccttttctgcgagacggcgctggagctccatggggaacgccttactggagtgaccacggcggacgtctgccggatgcgatgggaggggagccggatctcccctgagccgtgatgggaccgggattgccggaaggagctgaaactgtgcgcaaagacactgaaaaaccatccttttttgtgcggctggccacggtgatcgtggataagcggaagctgatctttttcctgtacgcgtgtgcgctgctgttctgcctgttctcccggaactgggtcagcgtctgcaacgacatcacggagtacctgccggactccacagagacccgccaggggctgaccctgatggaggaggaattcaccaccttcggtaccgcccgggtgatggtgtcccacgtgacgcggggcatcgcggaggatctggcggaacagatcggggagatcgagggcgtctcctccgcgtccctgggagacagcatcggcgcagaggaggacggggaggccgagacgccggaggacatcgcatcgtatttcaagggcgcggacgcgctgatctccgtgacctttgcgggggaggaggatgacgaatccgccctggccgccatggaggccatccgggagctgctggccccctatgacttttatatagacagctctgtgggggattcccaggcggactccctggccgatgagatggggatcatcctggcggtagcggcggttatcatcgtgctggtgctgctgctgacttcccgctcctatgcggagattccggtgctgctgctgacctttatcgcggcggccctgctgaatctgggcacgaacttcatcttcggagagatctcctttgtctccaactctgtgacggtggtgctccagctggctctggccatcgactatgccatcatcatgctgcaccgcttcctggaggagcgggagcacgccggagaccgggaggcgtgcattgcggcggtcagcgccgccattccctccatctccgccagcagcctcaccaccatctccggcctggcggccatgatgttcatgcagtttcagatcggcttcgacatgggcatcgtgctgatcaagtccattctgttcagtatgctgtcggtgttcaccctgatgccggggctgctgatgctcttttccaaggcgatggagaggacccgccaccgcagcttcatccccaggatcgaccgctggggcggatttgtcctgaagctgcgccatgtgggagtgccgctgttcattgtggccctggtggggggctttttcctctccaaccggtgcccctatgtgtacggctatacccagatcgagactgcgcggcagaacgagtcccaggtggcggagcagcgggtcagcgacaccttcggcacccagaacgtgatcgctctgctggtgccccggggagactatgacagtgagaaagccctgctggaacggctggaggcctgcgatcaggtggactacgccatgggcctctccaatatcgaggtgatggacggacacaccctcaccgatgccctgacgccccggcagttttccgaaatgacagacctggactacgagctcgtctgcctgctgtacactgcctacgcggcggaggaggaggcctacggccggatcgtgggcggtctggacgactatgcggtccctctgatggatatgtttttcttcgcctacgacaaggcggaggggggctatgtggatctggacgaggggcagcaggcggacctggacgatctctatgaacagctcgacaacgcccgggtccagatgctgggggaaaactacacccgtatgctcatcaatctgaacctgccggaggagggggcggagacctttgctttcctccagaccatccaccgggaggcggagcggtactacgacgcggacagcgtctatctggtgggggattccaccagcgactatgacctgtccgtctcctttgcccgggataacatcatgatcagtgtcctgtcggtggtgttcgtcatcatcgtgctgctgttcaccttccagtctgtgggactgccgatcctgctgattttggtgatccagggcagcatctggatcaatttttccttccccggcatggcccagaagcccattttcttcctgagctatctgatcgtgacagccatccagatgggcgccaatatcgactacgccatcgtgatctcctcctggtacaatgagctgaaggcggagatgtcccgacgggacgccatcgtccaggcgctgaatctgtccttccccacggtactgacctcggggagtatcctgtcctctgccggattcctcatcgcccaaatcaccacagagcctgccatcgtgggcatcggcgagtgcctgtgccgggggacgctgatctccatgttcctggtcatgttcatcctgccccagatcctgttcctgggcgacgggatcgtggagcggacccggttcgatctcaaggtgccggaggttgccaggagtgcccatggcaccgtctatgtcaacggccgggttcggggccgtatttccggcgtagtggatgcccagatccagggcgtgatttacggggacgtctccggaatgctggagacgggagcttatcagaaagaggaggagcccgcccatgagacggaagattcataaatgcctgagcttccttctggcggcggtgctgctggcgtccctggcggcgcctgctgccctggccgccgaaggcggggacacggttttcgtccgcacggcggaggacctggtccaactggcagagaactgcaccctggacagctggtcccagggaagaattgtccgcctgcaggcggatatcgacctgtccggcacggacttcacccccatccccacctttggggggacctttgaggggcagggccacaccatttccggtctgtccatcacgggcagcggcaatgtccggggactgttccggtacatacagccctccggcgtagtgcgggatctgtcggtggagggacgggtcgatccctctgaccggaagaataccctgggcggcattgccggcagcaaccggggccttcttgccggctgcaccttccacgggacggtgcggggagcggacagcataggcggtcttgtggggatcaacgagagctcgggacagatcgtcaactgcactttctccggagccgtcacgggagagcattatgccgggggcatcgccgggcagaactacggcgccgttatccagtgccggaacagcggcagcatcaacaccacggaggtggatgcggagctggatctggacgccatcaaccgggaacagctgaacgcggcggaaaacgtgccggtatgcaccgatatcggcggcgtcgccgggtattcctctggtatcatccagagctgcaccaattccggcagcgtgggctatgaccacgtgggctacaacatcggcggcatcgtggggcggcagtccggatatctggacggctgtgccaactccggcgacattctgggccggaaggacgtgggcggcgtcgccggtcagctggagccggaagtgcggctgctctatgaccaggggcagatgggggagttgctggatgccctggacggtctgggggatctgctggaccagacgcagcaggatctgcggggcacttccgacgctctgtcggaccggatggacgccatctccgcccggacggacgaggcccgggaggcagtgggcgatctggcggactccgccgcggactggaccaatgagaatatcgaggagctcaacagcctcacggcccggatctcctggctcatcgaccagctggcgccgatcctggatgacgccgtcgatgtgatggacctggtggaggacctggccgacgagcttgggaatgcgctggatgaagtcggcgcggcatcagggctgggagatcaggcggaacaggagctgcgggcggcagtccagtccctccgccgggcggcctccagtggaaaagaggccgttgcccgcctgctgtcggcgctggagcatctgggcgcggccctgggcagcgccctccagagccaggaggccatggaagaggttcgggctgccgccggggacctggcagccgccctcggggacatgtccgacacgctggcagagatcgcccgcattctgtggaacggcggcgacgaagcggcgctgggagaggcggctcaagccctggcggatacactggccagggcgggggatgcgctggaacaggcggcgaacgccgtcgcggcccacatggacagcggcgagctggaagaggccgggaaggacgcggcggccgcatggcaggcactgggagaggcggctcaggccctgcgggccgccgccggacacgccaccgacgcggcagcgctgctggcaaagcttctggcacagggcggagacctggcggaagcgtttcgggacccgggcaggacgttggagaaagtggcttcccgggcatcccgtctcggcgaggacctggccgacgtcttttgggagctggccgaggagcccaccatcaccatccgtcccattgacagtgccattcgggagcagggggacgccctgggggacgtctttgccggtctgctggaggacggcgacgccctgcgggagaccatgtccgcggccacggatacactattggacgatctggaagccatcggagaccagttccgggttatcacggatctgctgcgggatctgctggagcaaactggagaggaattgtcggaccgtttcgaggacatctcggaccaggagaccagtggaccggataccggatgtgtcgccaattcccggaacacagggaccgtggagggagacatcaacgtggccggcatcgtagggtccatggccattgaatacgacttcgaccccgaggatgacctgatcgaagagggagaccgctccctggacttccgctatcagacgaaggccgtggtccgcgcctgcatgaaccggggcggcatcaccggaaaacgggactatgccggcggcgtggtgggtctcatggacctggggcgggtgagcgcctgcgagaactatggggacatcgccagcacggacggcggttatgtaggcggtatcgccggcgcctcctgggggaccatccgggacagctgggtcaagtgtcatctctccggcggcgattatatcggcggcgtggccggactgggagccaccctggaaaactgccatacgctggtggaaatcgaagagggctccgcctatctgggcgccgtggcgggagatgtggacgccgatgccgccgtatccgacaacacctttaccagtgaacgactgggggctctggatgggatcagctacgccggccatgctgaaccggtggattttgacaccctgtgcaccacgcccggcgtaccggaatccttctcccggctggagctgacctttgtggcggacggcgtggtggtagaggtcgtccccttccagtacggagaggggattgacgccctgccggagattccggcgaaaaagggctgctctgcctcctggccggatctggactacacctgcctcaccgccagccagaccctggaggcggagtataccccctacacctccgccctgacggatggcggggagctgccggagatcctggtggacggcagcttcagcagccgggcacaggtctcccacaccacggaagaggtggcctggacggacggcggcgcggagtatgcgggcaccgcctataccgtgacggtggaggacccggacctggaacaggcggcctacacggtccactgccgcctgccggaccccggcaagcggtacgacctctgggtgctgagtgaggatggctggaccaagacggatgcccggttggacggccagtatctgctgctggagagccagaccgggacggtcaccttctgcctgacggagcgggccggtcctctggcggtcgttattctggccgtcggctttgccgggctgttgatcggcttttgctggctcatccgctggcggcggaaaggcactgcggcaggacgcaaacactgacctgcggccgtgtgcggaggagacaaagcacgatatggcacgctctctgccggagaatggagatgcggtccgtatgccgcttttggggttccccggacccggtgccggaaaaggcatggcaagctgccatgccttttctgccgttcatgcggcgattcgcgtttcgcggatggctgtgcgccacgccgcatggacggacaacggccggggattctcctggcaatctctgtcctggcggacttccgccggaggagttccggcagaatgatgacaggcggaaccgggctgccggagcgtgcgttggcaccggagggaagcaggcggccccgtcagcagaatcctcgcctgggaatggcgcggcatcgcatcccggaccggacagccggggcgggacggccgcaagctgcttgtgtgcatgattgaggcggttgaaatcctgaaagttaagcggttataccggacatattgttgagaatggccctgtcttatggtatgatttggttgatcgcccacggacagggagatgccacgcttccttggcctgtccggcagaacgcctggggaatatcccggcaggccggggcaagagaaacaagtatctatggtcaatcggggaagggccgatcatccctggccgccgggcaggctctggccgctgcaaaacggcgctgccccggtctacccatcattttcaaacacgcgggaaatcctgcccgggttgaaaagagagggtaaaagccgcgcctgtccgtttcggtccgcaatgagaagggagtcctttgatccatgtctgcattcagcgaatttttcctcatgaagccggatgacgtcaagcgctatgcggcagaggttcttcaccggttcgacccggatgaggagaccacctgtacggagatcggcgacggcaacatcaactacgtcttccgggtccgctctctgcgggatggccgctcggtcatcgtcaagcaggcggacaagcggctgcgctcctccgggcggccgctggacatctatcggagcaggatcgaggcgcaggccctgcagctggagtcccggctggcgccggattacatcccggaggtctaccactatgacgagaccatggcggctctgtccatggaggatatctccgcctatcggaacctccgcaaggagctgctggcgggcaggatatacggccatctggcggagaacatctccaccttcctggcccagtccctgctgcccaccacggatctggtgctggaccgccgggagaaaaagcgccgggtgcagttcttcaccaatccggagctgtgcgacatcacggaggatctggtcctgacggaaccctactggaactacaagggccgcaacatcgttacccccgggaacgaggactttgtcaggacctttctctatgaaaatgatgcccttcacagggaggtgggcaggctccgaaacggcttcatgaacaacgcccaggcgctgctccacggggatctccacaccggctccatctttgccaacgaacagggcgtaaaggtcattgatccggaattcgccttttacggtcccatgggatatgatatcggcaacgtcatcgggaacctgttcttctcctgggccaaccgctgttttaccgcgccgcaggacacggcggctgcccgggcgctggaggataccatccgcggcgtgtgcgacctgacggcggagaagctgaccgccaggtacgacgagctggtgaccttccccctgtaccgggcggaggggttctgccgcgcgtatctggacggcgtcatggccgactcctacggctatgcgggcacggagatcatccgacgggtggtgggcgactccaaggtcatggaggtcacctccgtcacagacccggacatccggattcccatggagcgggccctgattaaaatgggtatcttcctaatccgggagcgggagagcggcctgaatggctccgctgtgaccagagctttccgcgggatactggcgtaaaggaggcggcaagatggaacgtatggaccgggatatgccgttcctgctgcaatatgagcatgtggcgtggtttgagaagggaaaagtccgcattctggaccgccgggtctatcccacagaggtccggttcgtggtgtgcacggactaccacgaggtggtacaggccatcgcggacatggtgacccagagcgcgggcccctataccgccgtgggcatgggcatggccctggctgcctggcaggtccgggacaagggcgcacgggagcaggaggagttcctgcggcaggcggcctatgacctggcacacgcccggcccaccaccgccaaccggtacggccagatcacctgccgctgtgccgatgtggcgaaggagaccctggctgcgggccgggatccggtggaggccatcgtggcatccaccgtggagtccctgaaccgccggtacagcaccatgcaggtggtgggggattatctggcgaatctgatccccaatggcggcgccatcctgacccagtgcttcggcgaaaccatcatcggcacagtgatccgggccgccaggcggcagaacaagaccttccgggcctactgcgcggagacacggccttatttacagggggcccggctcacgtccagctgctttgcccagatgggcatcgataccacggtcctgacagacaatatgatcgcctacgccatggagcgggagggcatcgacctcttcacctcagcggcggactccatcgcctgggacggccatatcgccaacaagatcggcactttccagatcgccatcctggccaagtgtttcggggtgccctactatgtcaccggcatcccggaccgggagaagcggacgaaggacgacatcgtcatcgagatgcgggaccccgcccaagtcctctcttatcgggggatccccaacacgctccccggggtgaaggccatctacccctccttcgacgtagtgccgccgcatctgatctccggcgtggtgacggacaagggcgtgtatgtgccgtatctgctgggaaactattttgactctgacgtcaagccgttctattgacggcaaagggccgccgggcggaagaattggaaaacgcagggggacggtatgccggttgcggcgctgggtcggatgccgaagagcacccccggcaggccgatccggctgtgtggaaggaatctgggtaggtcctctccgccgggagaaatgtgctctgctgcatatcaggcaagggacggaagccccgcccgccttttccggcgtgtccgcaaaaccggaatcatacgggcagctatatcagaaattaaaaatgaaaatgaaaacaggaggcagcaaattatgctgatgcaggaggaaagagagctggttgttgaatacggcaggaaaatgagcaccgaccgtctgagcacgggaaccagcggcaatatcagcgtctgcaacgcggaaaagggactgatggccatcagcccctccggcatggactatttctccaccacgccggaggacgtggtcatcacggacctggaggccaacattgtggacggcgtccgcaagccctccagcgagtgggcgctgcacaccgcgttctatcgccacaagccccacgccagggccgtggtgcacacccactccatgtactgcaccacctttgccgtgctgggccagccccttcgggctgtccactatgcaatcggcgacaccggagcagccaccgtcccctgcgcgccgtaccgcctcttcggcacagcggagctggcagaggccgccatagaggcctgcggcggcagcgacgccgttctgctgggcaaccacggcctggtggcctgcggcagggacctcaaaagtgcttacggcctggcctgtaatctggagtacgtcgcggagctgcagtaccggaccatgtgcatcggcacgcccaatatcctgacggatgagcagatggcggaggtcatggagcgattcaggtcctacggccagcccggcagcggcaaggccggatattgagcggggcggaggtcccgcggagatcttcaccagcctccggatggcattgaacacaccggcatcaaatgcgatcttgcaggagagccagccccgcgctcagcaggcgcggggctggctttttgcctgcggcggggaaagcctcctgaagcgccaaggcagacgcccctgtgaagccgtatcctgggaaaaattttcccggtctcaaaatgccgcgataccttgcagctgcccattcgttacctgttggtgcctatgccacaagattgtgcgtactttacgaaagccgcctgccgcgctaccatgggggcacagatcagaaaacgaaagggtgttctccatgaacgaaaaagcaaaaaaatacgtggacctgttccgccgggtgaagatcgcagccgccgccacggtggatgcggagggccatccccaggcccggatcatcaacgtgatgctggcagaggacgatgggatgtatattgtcacctccagaggcaagcccttctacaagcagctggtggagacgggagagatcgccctggcagccatgtgtccagactgccagtccctgaaattcaccgggaagctgcgggtcgtggacaaaagctgggtggacaaggtctttgcgcagaatcccggtatgaacgaggtctaccccggtgagagccgctatatcctggacgccttccacatctacgcgggccatggcgagtggttcgacctgctccactatcccatcagccgggagacatttgcctacggcggggacacggaggagtacaacggctttgtgatccaggatgcatgcatcggctgcggcgcctgtgcctcagcctgtccccagaagtgcatcactcccggaacgccctatgtcatcaactgggcgcactgcctccagtgcggccgctgcgcggaggcctgtccggcagacgcagtgcgccgcctgcacccgtaagcggctcatggaactgctgcaagggattttgggcctgtacgcccagcgggcagactggttcgcgggattgctgcaggcccacatcggcctggctctgaccgccatcgccatgtccggcatgatcggtcttttgacaggcatctggatcgcggagcatccccgtatcgcgccgccggtgatgggcgtctgcaacgtgctgtacaccattcccgccatctccctgctgggcatcctgatccccttcagcgggatcggcaacaagactgccgttattgccctgacggtttacggcatcatgcccatggtgcacaacacctacgtgggactcaccacactggacccggatattctggaggcagccaggggcatgggcagtacggggacacaggcgctgtttcgggtgaagctgcccatggccgccggagtcatcctggcgggcgtgcggaacatggtggtcatgaccatctccgtggctggcattgcctcctttgtgggggccggtggcctgggcgtggccgtctaccggggaatcaccatttacgatccggccatgacggcggcgggcagcatcctgatcgccctgctggccattgtctgcgatctggcgctgggcgcgctggagcgctatttcaaaaagagaggaagctgaacttatgaacatcctgaatcgactgcaggcggccgtcctagccatcctgatgctgggcaccctgaccggctgcggcggaggcgccgcctccggaggggagaccggctctggcgaccctgtccggatcgccaccaagcccatgacggaacagtacatcctgggagagatgctgggccttctcattgagcaggccggctatgacgtggagatcactaagggcgtgggcggcggcaccagcaacatccagcccgccatggagagcggagagttcgacctctatccggagtatacctccagcggttgggtactggtgctggaccaccaggccgagggtgtggatgatgcagagatgttcacccggcttcagcaggagtacgaggagaagttccacatgacctgggtggggaagtacggcttcaacaacaccttcaccgtcgccgtccggggcgatgtggcggagcagtacggcctggagaccaccagcgacctggccggggcggccggtgagctgaccttcggcggaaacccggactatctggagcgggaggacggctttccaaccctgtgcaagacttacggcctggacttccggaatgtggtggacatcgacatcggcctgaaataccaggccctggccggcggagatatcgacgtgaccaacgccttcaccaccgacgcccaactggcgaatccggacacagacctggtgacgctggaggatgacaagcatctgcaggtgaactacttttgctccacggtggtccgccgggacgcattggaaaaattccccggtctggaggaggtgctgatgcagatggacggtattctctcagacggggagatggccgcgctcaactaccaggtggaggtggagggccgggacgagcgggatgcggccagggacttcctgctccagaagggcctgctggaggcgtgatatgacccagccgatcattcgctttgaaggcgtctccaaggccttcggcacccagaccgttctgcgggacttctctttggatgtggagccgggcgcatttgtgtcgatcatcggccggtccggctgcggaaagaccaccgtgctgaagctggtaaacggcctgctgtcgccggacacgggccgagtcctgatccaggggcaggatgtggcccgaatcgacccggtggccctgcgccgccgcatcggctacgccatccagaacgtgggcctgtttccccacatgaccgtggagaagaacattgcctatgtgcccgccatctccggcatggaggaatggaaggggaagcagtgcagagaaaaagtcgctgccctgctgaagcaggtggggctggacccggcgctggcggggcggtatccccgcgccctctccggcggacagcgccagcgggtgggcatcgccagggcgctggccgccggtccggagcttctgctgatggacgagcctttcggcgcggtggacgagatcacccggggccagctgcaggatgagctcctgcgcatccaccgggagagcggcatcaccgtcctgtttgtgacccacgacatcgcggaagccctgaaactggggacccgcacactggtgatggacgccgggcagatccagcagtatgacgcgcccagccgcctcctggcgcacccggccacgtcctttgtggagcggctggtccgccgcagccgggtgtttcagacccgggcgtaacgtctccggcagaccggccgtccgctggaaatggacaaaagagaaaagaggtccgaaggacgtacgtccttcggacctcttcgcttatggggatcagcttgccagcatgctgggcagccaggtgaccagcggcgggaacaccgcgcagagcgcggtcacgatacagatgatgataatgaacggtataacgcccctgtagacctcctggattttgatgctcggaggcaggatgcccttcacatagaacagggcgaagccgaagggcggcgtcatgaagcaggtctgcagcaacgtggcgctgacggccaccagccacagccggtcgaagccgaaggtatccatgatcggcaagaagatggggaacacgatcatgacgatgcccagccagtcgatgaacatgcccagaaggaacatgatgaccatcatgatggcgaaggcgccccacttgccgatacccatgctcaggacccagtccgcgatgatctggtcaccatccagagacatgaacacgccggtaaaggcagctgcgccgaagaggatgatgaacaccatggcggtggttttagcggtgtcgatcagagactcatagagcatcttccagctgaactgcttgtagaagatcgccaggatcagggagaacagggcgccgatgcccgcggcctccgtgggggtggcgatgccgccgaagatggagcccagcacgccgaagatcagaatcagcggcgggatcaggttgatcagggagccggtgatgcgcttcttcaggggcatctccgccagctcctcgggactcatggccgggccccagtcgggatggatgtggcagaccaccatcaggtagatgatgtatcccagggacaggctcagaccggggaccatggcggcgaagaagatcttgccgacggagacctctgcgtaagagcccatggagaccagcatgatggagggcgggatcagaatgcccagggagccgccggcgcacaccatgccgcaggccagggagggtttgtagccgctgcgcagcagcacggggagagacagcatgcccatggtgacaacggaggcgcccacgatgccggtggtggcggcgaacacggtggaaaccaggatcacggccagacccagtccgcccttcaggggccccagcaggtaacggatggactcaaacaggccgtccgccaccttggagtgggtcaggaagttggccatcagcacgaacatagggatggccaccatggagtagctttgcatctggtcgtagatctttgtcatggcgatggtgacgccgggggtaccccaggccagccagccgacgatgacgccggcgccgcccagcacgaaggccagctcctggcccaggacaaggcccacgaccatcaggccgaacaggccgaggatcagcgccacgccaagcgtgccggcggggatctcagcggctgcaaccagcccctgcagttgttccaaaatcgcagtcatccctgcgcctcctttccgttcgcggaagccgtgacgagtccctccacatgcttgaggatctcagagacggcctggatggcgagcagcaccagccccacgaacaggcagagcttcaccggccaggtgggcgcggcccacacggagtaggtctgctcaccggtggtatacgcgttcaggaagaaggtccagctggcgggaacgagacccatcaggaaggggaccaggaagatcgcgtatgtgacgatatgcaggatgtgctggacccggacagggaacatggcgtagaccacgtccaccgccacgaaggcctttttctgaaggccgtacgcgctgatcagaatgatatagcaggcgaacagcatcacgatcaggtcctgagtccagatctgcggccggttgaaaatacggcgcaggatgacctcgcacatgatgacggcaaggattgccagcgacaggacggagaagatccggcccaggaagtcgttgaacttgtcgatgccattgtagattgctttgatggctttcatcagaaattcacacctctttcataaactctctcatcagttgttgaagaggcgttcattcgccgcggttgaagccgaagccgtagtcgccggtccagtcgcggtagttgttggcagtctcacggtaggcctgcatggactcatagaccatcttgaagttggggttgatctcgcactcctccttataggtctcgatgcaggtttcgcggataagctgcatgtcctcgtcggacaggctggtgaccgtgacgccctgatcctcgatcatctgattggtgacggtcatatcattgtagatgtaacgggagagctgctcaccgcagcagaggcgggcggcgctctcaaaggccacctgataggcctcaggcaggctttcccaggcctgtttgttcaccatgacgccgttgacaccggcggactgataccaggcgggggcgcaccagtagggggcgacctcctgcagcttcagggagtcgtcggccttggggccggagaactcgccgccgtcgatcacgccgcgctgcagggactcatacagctcggaggcggccacggtggtgatgttgatacccagcttctgcgctgccttgccggccatgacgccgcccaggcggatcttcatgtgctgcatatcctcgatggaggtgatgggggacacggagcggatgccggactcggaggggttggtaaccagcgggaagtactccatgttgtactggccgtacatctccttatagcagtccattccgccggcctcatagatccaggtgtagtagtccagggcggtgaagtcgtccatgatagtggacagcagctcaaaggccgtgtccttgccggaccagtagccgccccagtcgccgccgcactccacggtgccctggctgacaaagtcgaacagctggctggcggagcacagttcgccctcggagtaattggtaatgatgaaccggccgtcggtcagctggctcaccagctccgcgaagcgctggtccacggtgaagtggacgttaccagcgccccaaacggaacccatcttccaggtcacgacaggcaggctgctgtcgccgccggcagcggtggcgttcagattcgcggtgtccatgatgccgctgtcggcagatgcgcagccggacagcagcacggcgggcagcagcagcgccatggtcaggaacagtgcaaaaaatctctttttcatttcgctttctccttggtctttcctaatttcacacaggtgcagggggaagtcactcagttccggggatcgccttctttccgttggccgcagggccgtattcaagaagctcccgctgttccgccggggagcgcgggagaacatcttccacaagctgggccgcccatattctggcggcggacatcaaaagagcccgctcttttctgagagtcggctctgcttgaccggaggctcctcgccgcgcttgcgcagctgcccgcgcaggcggctcagagacactggggacatacataaaaaggatgcgatgtgcttgatgctgaccacgtccgccagctcgggatagcggcggagaaaccactggtaccgctccatggcggagctgatgccgagaaggagcttcagctcccgttccagcttcagtttctccagcaggtaagaactatacagctgctgcagctctgcggactgctggaactgctccgcaaggagctgggtagggatggacaagagcacacagtccgtcaacgcctcaaagttgatcgggaaggaagctgtcaagatgctgagactcagcacggcctctccaggccggtagaggaagcaatccgtgatatcccgccctttttcatccgtcaggtaaccccgaatgactccgctgaccagaaacgggatccagtcagagcaggcgtccggcttggcgacaagctgcctctttttgcaggaaaaaagccttgaggcatctgcgagactggcggccagatctgtatcctcaaggtggaggatctcctccaaacaatcctgaatatgcatcgcatcttcctttctttcgccacaattatacaaaattgcagggaagattgcattaacacaggttaatttttctgtcctcaaacagaaaaaagttaacattttattcaaaaattttttaaatgcaagaaacggatgacacacagaaggctatcctgggaatcacctgggtggagagcggaatttctgttgaaaatctattgacatcgtgtcagaatacggctataatgcagatactgacactatgtcaataaggagacctgcaatatgagagcgaatgtctatttcacaagggagatcacgcctgaaaaagtagtggagctgtatcgtgccctgggcgtggagctgcccggcaaggtggccgtgaaggtccactccggggagaagggcaaccagaatttcctgcgtccggaattctggtgtcccatggtagaggaggtccacggcaccatcgtggagtgcaataccgcctatggtgatgcggccggcggtgtccgggatcatacggagtcccaccggaagctgctgcaggagcatggctggaccaagtacttcgacgtggacctgatggacgccgagggccccgacgtggtgtggcccatccccaatggcaaggtcctgaaggagaaccacgtgggcaaacacatcctgcattatgactccatgctggtgctggcccacttcaagggccaccccatgggcggctacggcggcgccctgaagcaactggccatcggctgcgcctcccgggcggggaaggcgctgatccactccgccgggaaaaccgatgaccgcttcaagacctgggagcagcacgccagctccgtggtctttccagaggccatggcggatgctgcctccagcgtgatagagcactttcggggcaagattgccttcatcaatgtgatgaagaacctgtccgtggactgcgactgctgcgccgtggccgaggatccctgcatgaaggacatcggcatcctggcctctctggacccagtggccatcgaccaggcctgtattgacctggtaatgcaatccgatgatccgggcagggaacacttcatggagcgggtgaacagccgcaacggcatccacaccatcgaggccgcagcggaattgggcttcggctcccgggcgtatgatctgaccgaactgtaagcattgaaaggagcaacctgcaatgagcaagatattgatcgcctatttttccgccagcggcgtcacggcccgcacggcgaaggagatggcaaaggccgctggagcggatctgtatgagatttgtccggcagagccctataccgctgcggacctgaactggatggaccagaagagccgcagcacgctggagatgaacgatccagcctgccgccccgccatcgcggcaccggcggcggatctggaccagtacgacaccgtgttcgtcggcttccccatctggtggtatgtggagccccgtatcgtggacacgttcctggagagatctgatttttccggcaagacggtgattcccttcgccacctccggcggcagcgggatcgagaaggcggagcggagcctgaagtcccactgtccccaggccaactggaagaagggcaagctgctcaaccacatggatgcggccgcctggaccaaaagcgtgctgaattcggggtgctgaagcgccggggccgcaggacaccggccttgagcaggcgttcccaatacccggcacatccggctgggtgagagctgtggacggacgccccgtgttctatttgacacagcgatgggaaaccggtatcatgtgtttgaacagcactgggaccataggcgcggaatgcgtgccggaaacccatggaaacaagagagggaactgccatgccgagaggatcagaagagctgacgaacgcgcggaaagcggagattgtcaatgcctgtgccgtactctatgagaccaggagcttcaaggagatcacgctgaaggagatcggggagaagacctctttcaccagaacgtcgatctataactatttccagacaaaagaggagatctttctggctctgttccagcgggagtacgaggcatggatcgaggatctggacgccctgcgctgcggacaccggaagctgtccgtggatgctttctccgacgagctggcccgcacactggagcggcgggagcggctgctgaagctgatggccgtgaatcactatgatatggaggccaacagccggatcgaaaatctggtggcgttcaagaaggcgtatggcggctccctgctggccgtgacccactgcctggagaagtttttcccccggatgacggatgaggacgtgcagggattcctctatgcttttttcccgttcatgttcggtatttacccctataccgcagtaacggagcagcagcgtacggctatggagctggcgggcgtcggctatgtccggatttctgtccgggagctgacgcggtcgtttaccgccaagctgctgcagggatttcaaatgtgagggaggaggtccgccggacccggcgttccgtttcctgtctgaatgacagccctgcgccggaccggcgcggggctgcttttcttgggtggaagcggcggaagactgtggggatgccgccttcccgacaggagctgccgggaagggagctgaaatcctggagggccggttggaagcacccggacgctgcggcccgctggcccatgcgcccgcctccaatcaagcatagaaggccgcccttgtaggtgcccgggaccgtttctcaaaccggaagggtgccatgatccaccccggtatgttaccgaaaaagactgcggctccgcattttggggtttccattttgggaaaattgggctatgatgaaacaaaatgggccccgataccagcacagggcagaaaggcgttcctatggatatcaaacagttgtattattttacggcggtggcacaggcgggcagctactccaaggcagcagagagtctggcggtgtcgcagcccacgctgtccgtcacggtcaaaaaactggaggaggagctgggtgttcagctcttttacgccttcaaccgggagcagcacctgaccgacgagggtctgcgcctgtggaccaaggccaagcagatcctggacctgtatcaggagacgctggacgatatgaagaccaccaacaaaaacagctccggcaaattcaccctgggcctctctccgctgttcggcgcctgctttttcggcgacttgatccccaatttctccatggagtatcccaatattgagatcaagatgattgaggacggcgcctaccgcatcgaccagcggatcgagcgcggcgaggtggatatcgccgtcacgctcaattccaaacgcctgtcctcctttgcttactgtcatttttccacccagaggaacgtggcgctgcttcacaagagccacccgctggcgaaggagccctccgtcacggtctcccagctccgggatgactctttcgccatcttcaatcaggacttcattctccacgaacagatcgtggacgcctgccatgcggccggtttccggccgaaattcgccctgctcagctcccagtgggatttcatggtggagctggtgtcaaaaaaccatgcggtttccatcctgcccaagccggtgctggacaagcatccggatcccaacgtgtgctgcgtgcccatgagcgacagcatgaaatactgggacatcgtgctggcctggaacaaggacaagtatatgccgaaagcctgcgcgctgtttctggattactgcaagcaccatctcccgccggatgacctttaagacgggtattgaagcgagctattattttttataataatattttttgaataatattatagaattggaattttacaataaaaattctatataatttttgataaattaaattattaaaatttatatattcttccgctatgataaacattggaagcactgccggccggcggcttttctgtgtgaaccccggatccgtccagagttgtagcctggaccagatctacattctgatagcgggaggaagaaagcctttatgttaagtttggttggcattattgtcggccttgcgctgctgatctttttggcattccgtggaaaatccctgctttgggccgctcctgtctgcgcgctgctggtggccttcaccggcgggctggacatgtttaccgcctatacgcagaactacatggagggtatggtcggcttcgtcaaggagtggttcccggcgtttatgctgggcgcgatttttggccagatcatgcaggattccggcggcgcggtctctttgacgaaagccgttgtaaagctggtcgggcgggacaaagcgatctttgcctccgtcctgtgcggcggtgtgctggcttatggcgggatctcaggcttcgtcatcattttctccatgtatcccattgtgctggggctgttcaaggaggctgacattacccggcgcctgattccggccacgattatgaccggcgcttttacctttgccatgagcgcgatgcccggcacgccgacgatccagaacctgattcccacagagtatttcggaaccaccgccacggcggcgcctgtgatcgggattgtgtgcaccatcatcatgttcgtggggcctgtcctgtggctgagctggcgggccaagaagttccgtgccgcgggcgaggggtatgacgaaccggatgagatgccggaggaggtgccggacgataagctgcccccggcctggtgctgctttatcccctttgtggtcattgtgatcctgctgaatgtgttcaagatgaacatcgtggtgtgcctgctggcggggatcctgctctccctggtgttcctgttcctgatgggaaaggtgcggggcagtgtgtatctgaccaatgtaggtgagacctgcaacaagggctgccagagcgcagtgtccgccattatgaacaccgcggcagcggtaggcttcggctccgttgtgaagattaccccgggttttgcgttcctgtccgagctggttttgggaatcggcggcagtcccctgatcgcagaatccattgccatcaatgtcctggctggtgccacaggctccgcctccggcggtctccagatcgccctggacgctctggcggataactttattcagatgtcccagacctccggcattcctctggcggtgttccaccgggttggctccatcgcctgcggcggactgaacaccatgccccatgacggcgcggtggtcacctatctgtcctactgcaagatttcccacaagcgcggatacttcgatatgttcatagtggccggcgcaattcccatcctggccaatatcgttgccatcattctgggtaccatcggcatcgtctgacgcttcggacgagatcaagatacaagataaatgattgaggaggaaatcatgatgactatgaaatccgcattgattaccggtgctgcgtccggtatcggcaaggcctgcgccgagcgcatggcgcaggaggggtacggcgtcgtggtggcggatgtgaatctgcccgctgcggaggaactggctgccaaactggcagcagagggcctctccgccatcgccgtccacatggatgtggccgatgagcaggaggtggaggctggttttgacaagatgatggagacctacggctcctgcgatctggtcatgtccaatgccggtgtgcagatcgtccacccctttgaggagtatcccttcgcggactggcggaagatgatggccattcacgccgacggcgccttcctggtgtcccgggcggcttaccgccggatgaaggcctccggcaagggcggccggatcgtgttcaccggctccgtacagtccttcgtgggctccaagctgaaagagccctacaacttcgccaagcacggcgtggccggactggcaaaagccatcgcccgggagggcgccgagtacggcatctacacctataccatctgccccagcttcatcaagacgccgctggtggaaaagcagatccccgagcaggcggcttccctgggcattacggaggaggaagtggtgaagaacatcatgctgcgggataccgtggacggggtgttcaccacggtggaggatgtagccaacacgctggtattcctgtccaaggatcagggcgctctgacgggccagtccctgcggctgacccacggctgggccatgatgtaatagaatcataggaatcataaaaggaggcagctatggaacgaattgcggtttatggagcgggcaccatcggttcctgccaggccacgctcatcatcggcaacggcctgccctgcacggtcatcggacactcggagcgggggctggagcggtgccggaagtccatcgagcagaactgggatgacctgatcgccgagggcctggctacggagggcaacaagcaggccgccatggccctggtcaccatcaccaacgaccctgccgctctgcaggagcacaccttcgtcttcgaggcagtggcggagggcactgaggagaagcgggccgtctatgagaccatcgagcagaacgctgcgcccaacgtggtgatcgcctcctgcacgtcctccatcgacgcagagatcctggcggggctggtttcccacccggagcgtcttctgatcgcgcatccgttccagccggtgcacatgctgcccctggtggaggtggtgcgccacgaaaagacggcggaggacacagtgacccgtacgctggcgctgctggagacgctgcaccggcaggtagtggtgctgaaccgcagtgtgcccggcttcctggtgaaccgttttgcccaggcgctgttccgggagtccatctacctcattgagcagggagtcaccaccgcggcggacattgaccgggcggtgaagtacgccgtgggaatgcgctatgcatccatcggcctgctggagtatttcgacgccgtgggatacgaactggagagcgccattgcaaagaacgtctatccggacctgtgcggcacccgggagctccagcagctggtgctggacggcctggccaccggcaagaccgggcaggcggcggggcagggcctgtacgactggtctcagaaggacgcggacgacttccgccgccgtaagcagagcccgtactttgcgggcgttaaagagtgggccatgcccgatgtgaagtgaccgctcgcagctgattcaaaagcagaaggacaggcatccggaatctccggatgcctgtctttttggaaagaggggagcacactgcggcgtgccgggctctttgcacacatgccgtcctgcctggaacggttttccactttccggatacggagccgcctgatcccacaggccggattcggagaggaggacaattgtttccatcaaaacgaaaatattactgtgctttaattggtgaaaagtaaaattacattacaggaaattcacccttctccgatgcggcgcggacggaggcggcctgttcagtgctgccgctggccctcgggccgaaccgccagcaggaccacgccgctcgccagcaggacgaactggacgaaaagaacggccgccggcagcgtaaacgccgggtccagtgtccccagggtcaggggatactgggcgaagaggcgcccgttccacagccccagcgattccggcagggggagcgccagacagacgggagaaaccagcatccagacatagagcagccagggccggagcattcccaacagccagccgctgcccagtgcgaacaccagcggagggaccagtgtgaccagcgtgggaaataccaggccgctccagccataccagccgaaatagatcccatagaagcaggcggcttctgagatgcaggccagcgccagcagggcggtgccggtcagagcggcggcgcaccgggccagggcgtaccggcggggcggaaggggagccgcgtctgtgagcactgctgcccgtcgggctttttccgaggtgaagaaggtcaggaaaaacagcgccccgatccagagcagcgggagcatccggctcagaaagtccccgaagctccagggggaaaaggggcggtgtgggacaccccgaggatggtcacgcgccgcagcacctgccagccgtagaacaggagcaccagcacaagcccggcgaaaaatttgttccacagcaggcgcttgcactcatagagaaaaattttacgcaaggttcaggtcctcctctgtcagcccgcaggcgtttaaaaagtcttggtaggtcagatagggatacatgggatccagctcccggttgaacaggccgcggaggatccggtccatggcctcctcgccgccgaccagttgctccgctttcaaaatcttcaggggcatttcgcagtactgccgcacatagcggaggctattggagatctccagccgctcctcttcgggcagcgcctccaaatagtccggattgcggacatagaagttcaggtaatagttgtccaccgcctgctgccactggtccacatagtgctcctgtgcgtaggatgggccgtatcgctccttgacaatacggtaggtggtgtagaccgtcaggccctctgccgaccaggggctgctttcatccgacgcatcaaacatgtttccaaggccccaccactgatggaccagttcgtggatcatgacttctccggctccgccgcccttgccggtatcgctcagattgtcggcggtgaagtctgcctcgtccagcagactggcgccgtttgcggcgtagccgccgccggtcacccggctctgaatgagcttcagggtatcgccgctgccgaaggacaacatgccgtagtgcgctgtacagtagtccaccaccgacttcacggcctccgccgccccggcggcctccatgacggcctgatgcttgcggccgtagtagaattcgatgtccatgccgccggcctggatatcctggcggatgtagtccccggcatagagaatgccgccggcgctgttggagtcatagcgccaggtttttgtgccgtctgtctgttctgcgacgacctccgccttgctggccccgaaggggatgaccgacatggatgcgggaagcgtgatctcgatggtggtgggataaccgttttcccccggcagcacgttcatcaggcggggagacaatccggcattttccaggcataggtattcagagctgatctccgtgccgccctgcatgatggacacattccggttttcccggggaaagccaccgtagtccatagtcagttcgatctcccggtccgacgggagggccacctccagcatggcctcgttgtactcctgatagtcgctcacagagaagggcacttcggcgccgttgacccgcacgttggagatggtatagcccggattgacgccgaaggccgctgtccacgcctgcccggaggtgttccggaaccggtaggccgccgtgccggagaccgtcccagcggtggtgtccgggaatacctgggcgctgcggctggtgcagaccacattctccgcatagggaacctggtagaagtccataaccgtctggtcggggttgctgtggtccaccaggggctgggcggcataggcaaagccggaacaggccagaagcgacagggcgatgataggccggtgggcccgccgcacgctccgggccagggagccgggcagccccttcccgtactgccggatgcagagatacgacaccgtccagatccccgccagggccgccagccaggtgagccgcatccaggctacggaccgaaagatgcggaaattggagaaatcgtccgacagcgcccacacgcaggggttcagccagcagagctgccagttgtccgcccagacagtcaggctcaacgccgcaaaggcggcaaagagcaccagggacaggtccgcccgccgggtatattgataggcggcagaggcagccagaatagacagcgggagcgccagtcccatgaacagcaggtacgccaggacatagtcgcccccgtcaaagatggagccgatcagcccacagctgatgggaagccacaccagcatggtgaggaccagcgccagtccggctgccgccagcagggccggcaggcgtaccagcgccgcagctagaggagaaacaaccgcattggtgagcacctccacacggctgcggccggcccggtccagctcatatactgtgagcaggccgaagagaataccgcccgccgcccctccggccagggccggattggccaggtacatggagagcatggtgctggcaatggccggcttgtagaggacgagtcctactgcgggggagatgacggtcagaagaacgatgagccaggtcatgcggctgtgcagaagccgtcccagctccagggggaacagacgcaggagcttcattgtaccgcctcccgtgagatgagatagaggtaggcgtcctccagagacggttccgaccgctggacataggcgggcagcgcgtccgccactgcgcggcatcggacgccctggctggtgttgacccgggcggtgatgtgcaggccctgctcctgaccggcttcccgttcccagaacacgcccacatggccctctgccgcctgaatcaactgctccggcgtgccggtgaacaggatttgcccgtggtcgatgaccaccagccggtcacacaccgactgcacgtcctcgataatgtgggtggacagcagtaccagccggtcctgggccgtgcgggagaacaggttgcggaagtggatgcgctcctccgggtccagccccaccgtcggctcatcgaggatcaggaggggaggggcgcccagcagggcctgggcgatgcccacccgctggcgctgtccgccggacaggctgcggatgcgggcgcgggcctgcccctccagattgaccgtccggatcacctcgcggacggctgttccggagtcccgcagccccttcagggcggccatatagtccaggaactgggccacggtgagctcgttgaacaacccgaaatcctggggaagatagcccagctgggccttcagctgccgctccgtcttgagaaggggctgtccgtccaccagaatggagccggatgtggggagcagggcggccaccagcagcttcatcagagtggacttgcccgcgccgtttggccccagcaggccgatgaggctgggagaccggagctccagactcaggttctgcagggcctgttttccgctggggtaggtcatgctgacgttttgaatgttgatttccatgtgatcgggatcctttctgcttgggatacggaaaggataccatggctgtgtggaggggagttggagattatgtgtggtttgtgtggagaagcggacaccgggaaatatcctgccaaaaaggttcgccgcagaacatttctgttttgcggcggactcgttttcttccatatacattggcggagcagtcagggatgcagggaatagaatttgttcaggcgctcggccagcgcctttgggttttcttcattcacaacatggccggtatgttcgataagctgtaattccgcgccagggatgttctgcgacaggtattgggcggagcggatattcgaacggtccttttccccgcagatgatgaggacgggacaccgcataccgcgcactctgccgctgaaatccagcttcttcatggaattgcccaagacaaacgtgctctctttatcaaaggccatggtgtcaaaaacggatctgggcagaaagcggaaaatcaggttttggataccgaacgccgccttgggaattttatgaggcgtcccgatcaggaccagcgtttttaccttttcggggaagtccagcgcatagttcagcgccaggataccgcccagtgaaagaccgcacagatggaccgctctgccgacgtgatcacagtattctgcaaacgccccatagaggctcggatagcttgctgttttcccggcaagcagggcacacaggtccggacacagcagctcctctttgccatccatgcaggagaccgtttccttccagcttgccgccttgtgtccagaaccatgaaccaggatttttttcgccatacgcaacctccttggcctgatctatgcagcttctccgcttgtacgatgtctcagcgtatacttgaaacggtcacatctgcggaagaaagtccggaatgggcagaaaactaaaaccttacagtcgcttttaccccttcctccgtattctcaatggtacacaccgcgccgtgccggtccaggatcattttcaccagatagagccccagtccgctgccgccggtgctccggttccgggaaccctcctcccggtaaaaggcttcaaacaggtggggcagggcatctccgctgacccgcgctccggtgttctccacactcagggcggggcggccctccaaccggccgcaccaaacccggatttccgccccctccggcgagtagcgggaggcgttggagagcaggttgcccacggccttccccagcagggaggcgtctgcgggcacggtaatccccggggtcagtgcggacaccagctgctggccccgctgctccagcagctcccggtccagagccagttgctgcgccatcagggcggacaggtccacgggctcctgccggacggcggcagatccggactccatgcgggagatggacagcatctcgccgatcaggcgctccatccggccggttgtctggagagagcggagcaggtacttgtcccggtcctgatatacgccgacgccctccagcatcccggccagctgtcccttcaaaatggtgacgggcgtcttcagctcgtgggaggcggcggagaaaaaggccatccgctgtcggtccagctcccgctcccgggccacctccccccgcagggcctggttggcggtctccaggtcggtgagggcggcagacagccgccgggccattttgtccagactgcggcccaactggccgatctcgtcccggcgccgctccccgcacacccactggaggtccagctccgccatcctgccagcgatgccgttcagccgcacgatgggccgggtgatataccgggagtacccgaacgcacacagcagggagaaggccagcagcgccagagccagccagggggccacccgccccagggcctccaccgcctggttggccaagcggagctgaggggagaccagcagctggtaggtcccctcctggtcggcaaaggtgatctgggtggtgaggatccccgtctgagtggcggtcaccacaccgtcggcccggtcaatctgcacctgataggtgtcggcctcataggtctggaccgagttgtccgccccggacatggtgacggccacctgccagtcctcctccggcaggaccaacagggagccggtgtccgcctccgccccgccgggggccgtcagggctacctccgccccgctctcccggacaaaggcgtccaggatgggccccgcgtcggccagattggtctgcgccagctgctgggtgaggtcggctacctgggcctggagccggtcgctgatcacagcggtgtaggtgatgggggtggcccaggcaatcagggcgaaggtgagtccccctgcccccagcagcagcaggaaggtaagcagaaaaatacgcaccgtcaggctttcagcgagtttccttcgcagcacggtagcccacccctctcacggtttcaatatagtcccgccccagcttgtggcggaggtttttgatgtggctgtccaccacccgttcatccccgaagaagtcgtagccccacagcctggagagcagcatctcccgggtgaagacccgccccggcgcggccagaaaggtgcgcagcagctcgaattcccgggccgtcagatccaggggacggccgtccagtgcagcctccctggtgtccaggtccaccaccagatcccggtaatgcaggcggctttccgccgcttcgccgctccggcgaaggatcacccggattttctccagcaggaccggcatggagaagggcttggtcacgtagtcgtcgatattcaggccgaagccccggagctgctgcgtctctccgtccagagccgtgagcatcagaatgggcacctgggactggcgtcggatctgcgcgcagaccccgaaaccgtcgattttcggcagcatgatgtccagcaggaccaggtcaaaagactgggcgcggaacaggtccagggccgccgcgccgtctccggccacagcggccgcatagcccgcgtcctgcagataggcgcacagcagctcctgcagctccggctcatcctccacgatcagaattcgtttcatcaacaatcaccgggaaaaagtatagcacaggattgtgaatttatcatggagaatttcatttccccctgtgtggggaacagacctccgtttccagcagcggccgcctgctgcgtgaccggtcccattgaccagtgggcaccggagctgtgacaggacgattcccagatccggttcgtgggctttgacttcttctgcatccaggtgttcaacccgcgtgaaaactccaaggacatgatgaccattgacaaccgacagaaatgtgaactcccggctgaaggccctccccgtggactggaactacaccatccccttcggcccgctccacgcccacgggtccgcagttactgtcaaacggttcctgagcgcggcgagggcggtattttccctttgatcccgcttcacgggctgtaacggaaaggtatatgcccatagcttttgaggcttctccggaaatctcaattttttataatagccccagaacggccgctatgcgggaagagaacgatacataatttgatttttgaaaatgggacgcggttcatttccggggccaggtgtctgaagaaatatctggccagctttttgagaaaaacggatcgaatatgctgctggtcgcagacagcagcggtggggagcgggacgcggagcacgggacgaagtgcccgccaggtccacctgccctgccccagcagcgaggcggcaggcggcccgcctgtgccgaaagcccgcctcgggggagtccaccggctgacccgaaagaaaaaaagagcggcatatccctatggatatgccgctctcctctgcgcgaaggcgcaccgggggagaccgtttccgcccggtgcgcgtttcttatgggatttcctccggtgcacggagctatccggctgctcggggcgtcagttctccaggtcctcctgcagggattccaccagggcgtccgccagctgatccagctctgcggccttgtccgcctgaagggaggaggccagggacagccgctcgttgagcaccgtcatgttcttgagttcctcgtcgatgaaggcctgcatcaggtctccggacttgcaggcccaggagccgttctcgatgatggcgaaggtgcggttctggaggttcagggccttcatgtcctccagatagctcttcatcaccgggtagatgcccagattgtaggtaacggaggccaggacgatgtggctgtacttgaagctttcggcaatcaggtaggacacatgggtgttggacacgtcgtacagggccacgtcggtgatgccccgttcgcaaagcttggcggccagcgcctgggcggctgcctcggtgttgccgtacatggaggcgtagacaatcagcacgcccttgacttccggctcatagcggctccatttgtcgtacttgtcgatgaagtagcccagatccttccgccacacgggaccatgaagggggcagatataccggatctggtccaggatgccgccggccttgcccagcagcagctggatgtgggggccatacttgcccacgatgttggtgaggtaccggcgggcctcgtcgatccagtcccggtcgaagttcacctcgtcggcaaacagcttgccgtccagggcgatgaaggacccaaaggcgtcggcggagaagaggacgccgttggtggtatcaaaggtcaccatggcctcgggccagtggaccatgggagctcccacaaaggtgacggtgtggtcgccgaaggaataggtgtcgccctccttgacctggatgcactcgtgaccgtccacatggaagccgaactggcgcatcagcatgaaggccttctccgtggagatgatccggaccttgggatagcgcagcaggatctcctcgatggaggcgccgtggtccggctccatgtggttgatgaccagatagtccagaggcgttccgttcagcaggtattcgaggttctccagcagctggcggcaggcggaccagtccaccgtgtcaaacaggacgctcttttcgtccagcagcagataggcgttgtagctgacccccttggggatggggtggatgttctcaaacagagccagacggtggtcattggcgccgacccaatagagattttcggtaacagttctcacacaatgcatgcagaaatcctcctttactcacagatgacaggccgttacgcctcaatgaactggtccttgggctccgcgcactccgggcagacccagtcctccggcagcttttcaaacaacgtgccgggggcgatgtcaccgtccgggtcgcccagctcggggatgtactcatagccgcagccgccgcagacgtatcgcttgccgatgggctccggcttggggagacggggccgcttcatcttcaccatgggcggcgcgggctgcttttcgccggtgtccagagcagcggtcagcaggggcagaatctcgttcacatccccaacgatgccatagtcgcagtttttgaagatgggggcgccggcgttggtgttgatggccacgatggtagaggcgtccttgatacccttcaggtgctgcaccgcgccggagatgccgcaggcgatgtacaggttgccggtgaacttctgaccggacatgcccacatagcggttcaggggcacgtatttcagcgtctccgccaccggacgggaggagccgatggccgcgccggcggccttggccagatcctcaatgagcttcatgttcttcttgccgccgatgcccttgccggcagagaccacccgctccgcctgggcgatgggggtgtccagggggatgcccacagtgaagtcgtggccgtccttcttcaaatgctccaccagggcggccacctgctcggcgggggagccgtcccgcaggatgaccttcttccgcacaccggtgacgggcgcgggcttcttgggctggctggaggaaccgccggaactcttgggggccttgcccaggatatgggaggcgatgaccacccgctggatctcgttggtgccctcgtagatggtggtgatcttggcgtcccggtaggcccgctccacctccatacctttcatgaacccggcgccgccgtgaatttgcagggcgtcgttggtgacctccagggcgatgtcggaggcgtacatcttggccatggcggattccatgccgtagggggcgtgcgcctccttcagctcggcggcggagtacaccaggaaccgggcgcagcggagcttggtggccatgtcggcgatcttaaaggagatggcctgctggaagccgatgggcttgccgaactggatgcgctccttggagtaggccacggcggcgtcataggccccctgggcgatgcccagcgcctgggccgcgataccgatgcggccgccgtccagggtggacatggcgatcttgaagccgtcgccctccttgcccagcaggttctccctgggcacttccacattgtcaaagatcagctcggcagtggaggaggagcggatgcccattttgtcgtagtggtcgccgaagtagaagcccttccagcccttctccacgatgaaggcgctgatgccccgggtgccgatatccggtgtggtgacggcaaagaccacataggtgtccgccttgggggcgttggtgatgaagattttgccgccgttgaggacatagtggtcgcccttcaggacggcggtggtctcagtgccgccggcgtcggatccggcgttgggctccgtcaggccgaaggcgccgatcttctcgcccttggccaggggcaccaggtacttgcgcttctgctcctcggtgccgtaggcgaagatgggccaggagcctaaggagacatgggcagacaggatgacgcccgcgccgccgtccacccgggccagctcctccacggcgatggcgtagctcagggcatccagcccggcgccgccgtactccgcggggaaggggatgcccatgaggcccatctcgcccagcttccggatggcctcgtccgggaactcgttctgctggtccagcatgaacgcgatgggtttgatctcctcctccgcaaacgcacggactttagcgcggagttcctcgtgtgcctgtgtggtctgaaacagcatagtcgtacctcctctttaatcttgataaaatttatcaactttcaagcaaaagaaaaactgtcaaatcaggggtccgtcaaaatctcctgcaggctgtgggcccgcagctcctcgtccagcttgttctgaatctcagccagcttgcagtgcacggtgcagccgccgtggcagctgcgccaggggcattgatacgccggatccatgcaggagctcagattcccgcgttctcccatggccttcatcaggtcatagaggctggtgccggtcaaatccgccgacagccgacagccgcccgccgttccgcggaccacctccaccagtccggccttctccagctttttcaggattttataggcaaaggcctgggggaggagttcatcctgtgcgatctgtcccgcggtatgcagttttccatccaacagtgcccgcaggatgcgcagggcgtaatctgtctcccgggtaatgaccaatgccgcgttctccttttatacgtcgtattgttaattggagaataccaatttggatattttttgtcaagtatcggatgcaaccctataaaaagtttggcagtgttccataaaaaaccagtcgtgattttgataaaatgccggggcggacgccctgggactcacggtgggcccacccgccgggggacagccggatatcggtgtcgttgccggggaacacactgttctgaaagtccggcgcggggtctgagggaaccgatttcagcaggacggcgatgccgttgtattcaaacgtattttcgttgtatagggagtggccgggagtgccatcggtgcagttgaaacggaaccgattgcccgtaaaggtgcagccggatgtgtgctccaggcggagatcgaaaaggcggtgtcccagacggtgaaggtgcagctgctgaccggctctacgacggcgaggtcttccgctgtgagctgtggctgccgtccgcctcttgacagcggcgggcgatctgctataattctgataaagttcgcaccatgcctgctgacaggggtgatagctgcagcccctttcgggcgccggccgcgagtcgcggccggttggctggattctggcgtatgcgcttcgcgcaggcgagcccgcttgcggtattggagcacacctgcgatgtgctggaagataccgccgcgcggttccccatacaaatttgtatcgctccgtaggcatgagaagggaggagagcacttgattgtctatcgggagctctcctcccttgtgcgggatctggggatccccgccgggacgctgtatgccgtcagcaatacactggaccgccattacatccgcaggcagctccccaagtcctccggcggtgtgcgggagctgtcggtcccggacccgctgctgaagcacatccagcgccagatcctgcgggtgctgctggtccacatgcctgtgtccccctacgccacggcctatcgatacggcggcagcaccctgtgcaatgctgcgccccatgtgggaaagccctgtgttttgaagctggacatctgtcatttttttgacagtatcctgtattccgctgtgaaggaaactgcctttccagctgaggtttatgcagagaacttacgtattctgctggctatgctgtgctacgggtgggatcggctgccccagggggcgcccacatccccctgcatcaccaatatccttatgcgggactttgacaacgaggtgggggcctggtgccgggagaggcagatcgcttacacccggtactgcgacgacatgacgttctccggcgatttcgcccgggatgaggtgctccggtgcgtggagccccggctgcgggcgctggggttctatctcaatcccggaaagacaaaatggctcccggcagaccgccggcagcttgtgacaggtattgtggtcaacaaaaagtgcaatgtcccgtccgaagagcgccgtgcactgcgccaggagctgcatttctgccaaaaatttggcatctccggccacatggcgcgagccgggatcgacggaccggaggaccgctacctggctcagctcctgggccgggtcaactaccagctgcagatcacgccgggaaggcgggagctgcaggaagcccgggactggctgatcaaagcacagccgcaatacggcggagggcgggagacatctccggcagaaaaacagatattgtgacatggaaaaagcgggaacatcacgtagatgttcccgctttttcggctttttccgaagagctcgggagaatatccccggcacataaaccgccgtctgtaaggtaaaataaggaggatcttttgttgaggaggtctgcaaatgtctgaacttacgatttccagtgaacgactcacagcctttgctgcgcacctgcgtgccgaggagcgcagcgccggtaccatcgagaattacctgcgccacatccgggcattcgccgtctggctggacggctctccggtgacaaaggagacggcggcagcctggaaagagcatctgcttacgcaggactatgcgccggcaacggtcaatgccatgctggcggcgctcaacggcctgtttcactttctgggctgggacgggtgccgggtaaaatttctgagagtccagcgccggctgttccgggacgcgggccgggagctgacacgtccggagtacgaacgtctgatggagacggcccgttccagaggacaggagcggctggcgctgcttatggagacgatctgcgctaccggcatccgtgtctccgaagtgcagtatatcaccatggaggcagcaaaacggggccggacggatatctttttaaaagggaaaatccgaaccatcctcctgccggaaaaactttgccggaagctgctgaaatacgcgcaaaaacacaaaaccgcttctggtgagatctttctcaccagaagcggaagaagcttgagccgccgtcagatctgggcggagatgaaacagctgtgcagatacgcaggagtggagccgggaaaagtattcccgcacaattttcggcacctctttgccacgatcttctaccgggcctgtaaggatattgttcgattggccgatgtgctaggccacagttccatcgaaaccacacgcatttatctgacgacctccggtgcggagcacgcacagcaactaaacaggctgggattgattttataggacataatttatattttgaccatataaaagcgaaaataaatatctttacttactgtatagatagtaatattataccatctggcattttgaaacacaagacccatcccgtcttttgacacacaaaaagagccgcaaaaatgagaaagattgcggcttttcttttcatacccatcagtgcctggaaggcgctgctggcgtggcactttttctttctcacagtgcaaactgtgcagagccagatattttatatagtcaaaatataaattttgaaataaaaatattctaaagagaaaaggatcgaacagacgctgacccgtgacacccggacagcgcgctagacagatacggtgtccaagaaaactcagtaatccacagcggacgaatctgcggtctgctttcgtctgctgctggagcatttccaggagcggtctctaaatgaaccgcttatcgtcagttgggaggaggtgatgggacatgctctgtgattttcctgttcgcagtgtttacaggcggtctccggagcgggagccgcctgtaaagcggctgtatcattgtgcgttctgaacctgaagcgcaggggttataaagaagttataaaaggaggaaacgagaaaatgaagagaaagttgctgtctgtcctgatggcgctctgtctaatactgacgttgcttcctacggcagtgtttgcagaggaactcacacctccggaagaatccggagaacagcaggaagagcagatcaaggagccttcgactcctgaaaaggagccagacgatccggagaaagagcaggagggagaagaggaccttcagcccagtgacggggatccggaactgcccgccggtgacggagaggatgaaagggatccgcagacgccggaagacggtgtacaggaccccaccggggaggaaatccctgaaaatggcagcacctctgtgccgaatgaggtgccgcttcaggagatcattcttctggaggagtccgccgttaccatggaacagaacggcgggacgacggaatatgactccgtcagtgcggccatcgacgctacgcaagcgtataacaaagacaccaacaaagggctgtacaccattacactgaatgagaacttggctgaagacgtggtgatcccggaaggccggtatatcaaaatcgacctgaacggccacaccctgaccaataaggaaagtcatacgatcttcaacaaaagcacccggattaccattgtggatacctccgcggagaagaccggcgtggtggataacatcagccatggcaggggtgcggtgtacaacaacatcaatgcggccatcaccctgcagggcggctcttatacccgctctcaggaggccagtaccggcagcgacgcaagcggcagcaacagctggtatgtgttgaagaacttcggcaccatgaccatcaaagacggcgtcacggtgaagttttctgatagcaactccggcctctattccagcctgatcggcaatggctggcagaacagctccgcagcggaggctggatccaatggtgagccccagcccagcgcgggcgggaagcaagccaagctgaccatcaatggcggcacctttaccggcggccagatcacagtaaagaatgacgattacggagagctgaccattaccggcggcaacttcacgcagcccggcgagaatcgctatgccgtatataatgccaacacggcaacgatctccggcggcacatttaccgccgagagcacggttgtgggctctgactactttgcaggcgaggccaacaccggcaagctgaccatttcgaaaggaacattcaccagtgagagcagcggaaccgccatttccatgggggccggcgcggatctcacgctcaccggcggcaccttccagacgcagggcgacggctcttcgtacgtgatcagtctggcagaaacggccacagcagaaatttccggcggcagcttccccggcgccgaggcggcgcgggttgtcaacagttccgacgccttcagggatggttacggcgtggtggaaaatccggatggctccctctctgtcggggtgaaagacgagtccgccgaggcggtcgtgattgcccgggatggaagcagaaccaactacctgactttgagtgcggctgcgaaagcagcgcctgccggcagcaccgtccagctgcagaagaatctcgtgctcacctccggcatcagcactgtaaattatggcgtgaccattgatctcaatggctatgatattgacggcacggcagttaccagcagtgacggcgcagtggcattgaagacgaattacagcagtaagccggttgacggcgtggactccactatgcggctcatcaactcggtttccgggcagggcggcaccattcaggcgaagctgcctgtcagcgtgaaatccgggaacagtacgattccgctgcccgccgaaatcggcgccggcgtgacacttgtggttctggagggcggtacggatgctgtcaagctggacagcagcgcgtatctcctatacagtgaaactgcggcagactatattgccaacggcggcttccgggtgagcgtcggcggtgtcgaccgcatttatggccgctatgccaatgcggcgagtgctgccggggacaatgccgtcgtgacgcttctgcacgattatactggaagtgacaagatctattccggcagccgcagcggcacgctgaatcttgccggcagaacgtatacttacacaggctcagacgcgattgtagatgtcaattatgagaatgtcggcctcaccatccagaacggcaccctgatggggacaagccctgaggcagatggagctcaagtgctgtacagcaacagttccctcaccctggaaggtgttaccgtcgacgttaagggagaagatatctacggcatcgtcaccaacggcaccaatgtgaagaacgccatcgccctgaagaacagcaccctcaacgtgcccaatgggaacggcatctacttccccagcaccgggacagtgaccatcgaaaactccatcatcaacgccaagtatgtgggtgtgcagatgtgcgccggcagtctggcagtacggggagcgcagacggccatcacagtgacaggggagccgacgcaaaaaactgacagcgacggcgtcatcggcgacggcgctgccatctccattgtggagcgggagggctatcaggacctgggcaccgtcaccattgaggacggaaccttccaatccgcagaaagtgttgatgcagtcaaggcctacgccttcaataatgcggataagacggaagaagcatggcccactgccggcgaggtagtttccgtctccggcggcaccttctccgctgaagtgccggaggccttgtgccaggacggctatgtggcggtcaaggatgagaacggcagctttgtggtggggaaagatcccgccaagacctttgtggcgcagataggcgacagggagttcaccacgatccagggagccattgacgcggccgtctccggcgacacggttcagatcaaacccgggacctatgccgaggatctcacaatcagcaagaagatcacgctgcttggcagcggcgcgggcgaagccggcacgatcctgacgggaacggtcagtgttgccgcggatggcgtcacactggatggcatctggttccagcagacctattctgaggaggactctaaggaccagggtgcctgcaaattaaaaaccacggaaacgggaacaaatcttaccatccaaaactgcattgttcagcggatgaccggcactgcaattccctatggcgccattgttcattacggcgccgccgaaggaaccctgactctgaaaaacacggaattgatcgcccctgttgccgggaccgcagacgaaatcaacagtgcgtctccttctgtgatcggcgttgctgcttgggcgcaaaccggcgagaatatcgacgaagcgtggaagctggttgtaacagactgtaccatccgtaccaacggatttgcggtgtttgaccgttggaacaacgccacctataccaatacgaccttcaccggactggaaggcgtggagggactcgatgacatcgaggtcaaaacgtgctatatggcgctcaataatccccatgcaaatgatgtgacatacgatcattgcaccttccggaacatgcgcagctggggaatgctggttgcaggcgaagagctcacggtgacagactgcacctttgatggaacaaaccagtcctgtgcgatctctgtggcctatggtacaatcgacaagtgtacgattacggggaacacctttgatctgagcggcagcggcagcggaattatgttcagcggcgcggtgaccgaaacctccacaatcacagttgcggacaacacattcaaaaactgcagccaggagggcggatactgcgtcaataataccagcgctgtggaaggagagcaggttgctccgatcacggtcacaggatccacctttatcgactgtgcgaacaagtatctgaaccaggtaaatgtggaggaagccgcagcctctgataccgcttacgtggtgtccggaaacacggagacgtactacgagacgctggcagaggcgatctcctccgcgcccgtgggttcggccgtgtatctgctgaaggacatcagtgaaacggtctccgtctccaagaacatctctatttacacaaacggccatgctttcagtgcggcaaatatccaatgtgccgcaaactactatgtgcggcagatctcgggagggtatgaggtttattattctgccccatctaccggctccggcggctctgacagcgatcccagttacgcccccatcctggatgtcggcagcggcggcagcgtgaaggtgaatccccggactcccgaggagggcgacaaggtgaccatcaccccggatcccgacagcggttatggggtggacgaggtcatcgtcaccgaccggaatggccgggagatcgacgtcaccgccaatcgggacggcacctatacctttgaacagccccgcggccgggtgaccatcgaagtcaccttcacccgcaccggagagagcgccttctttaccgatgtgccggagaccttctgggcctacgatgagatcgcctgggcctatgacaacggctacgtcaacggcaccacggccacgacgttcagccccaacggcagcatcacccgccagcaggtgtggatgatcctggcgcggctcagcggacagtctcccgccaacatggcagaggcgcgcacctgggccatggacaacggcatctccgacggcaccaaccccggtgcggcggtgacccggcagcagctggtggccctgctgtaccgctttgcggaactgcggaattatgccaacggccagcgggccgatctgagcgcctatccggatgccggcagcgtggcggggtacgcagtggaacccctgcagtggtccgtggccaacggcatcgtgggcggcaccagcgcagggacgctgaaccccgctggaacagccacccgcgcccagttcgcggtgatcctttatcgcttctggaatcaggtggcctgagacaaatcagaataagacagcagggcggagaaatccgccctgctgctttttgaaaaagagaaccaccggcaaaaccgatggttccaaaaagctttagccatgccgaaaaaatatcctcctttggtagaacaatggaggtctgccaactgctacaagaaccaaaggaggaaattgtgtgagtacaaggggacagaaattatagaggagaggcgtacaaagatcatgttcacatattggaaggtatcccgcccaagtacagcgtttcacagattatggggtgttgaaaggggaaaaatagtctgatgatctatgaaagcatgcgaacatgagataaatatggaaaccggcatttctggcgtaggggatatgacggcgcgaaggcggaccacatcttcaacggaacaggggatcaagaatcgtactgatggagaaggggcgcacctatatatcggataccggatatagattgctgttcaaaagggagcaatgcggatactatctccctatatacagatggttccaaaaccagccggaactgctgcccatattccgccggagagggatgagaggcagggcctgaaccatgcggcaagaccggatcggccgattgccttttccggaaggactctgtgcatcttctgcggccggggcaacagactagggattgggggaaagatcatgcttgttatgcaaactccatctgcgtctcagacaggaaacacagatggagctgtttcattcggcggcactattttttcagattccccgttgccgggttgtcgatcaacctgccctcctctgtaaaacgggagccgtggcaggggcaatcccacgtgtgctcctgcgggttccatttcaacgcgcagccgagatggggacaacgcttggcggaaggggtcaggaggttgaccacggcctcgaagccattgaccaccaattgggggcgaagaatcgttctggagggggaaaacacctcggcataggggctctgcttcccttggacaagatcgcacaggaccatggccgataccatggcggaggtcattccccacttgttgaaaccggtggccacatacaggtcggatgcgctggcggaataggggccgatatagggaacgccgtccagagacatgcagtcctgggtagcccagtgggatgtctccgcggccttgggatagtgccgctgggcgaaatcccgcagttcctgccaggccccgccctgttttccggtgcggtggtctccgccacctaccagcagcaaattcttgtagttgcgaaaggacatgcccgtctgggcctcgtccacatacatgccgtctacattcggggcgttttccagggcaatcacataggagcggtgctgatacagtttggcaaagaagctgccgtgcttattcaaaaagggaaagtgggtggctacaattattttgtttgccgtgacttttccataatccgtaattgcagttgttccgaccagctcccgcaccggcgtgtgctcgcagatgtgcaggctctttgaaatcgcggcgatccatttcagcggatgaaactgggcctggtttggatatcgaactgctccggccacagggaaggggagggggaggcggtctgtaaattccccaggaacccccagtttttccagggcatccagctcccgttcgattttccggcggtcattcagagagtacacataggcggtcttttcttcaaagtcgcagtccatgccgcggcacagctcccggtacttctgaagggccgcttcattggcatcaaggtactgtttggcctggccagctccaaatttacggatcagcttgtcatagatcaggccgtgctgggaggtgattttggcggtggtgtttttggtgatcccgccgccgatcgtctcagcttccaagagcagatagaggactccggcctggtgcagcagatatgcacataaaacccccgctatcccccgccgataatcaatacatcggtctttgcatcctgctccagatgacaaaaccctgtatgtccggacgtctgttcccacaatgactccatatacgatcctccaaatgcgtaatttagaaatagtgttctccaaatcacgggaacaatatgtggaggttcgacacgatggctctggatggaagggcgagccaacggctccgatgtacacgctcaccctgtaccgacggaaagactccgcagattgaaagccgtcatttgcgcttccgccatccggaaattccagatgcaaggaacagcactcagccccaggcagacacagatctggacggcgcatgggagatgcttttgaaaaatccggccaaaacgcagcgcagcggcgcaaaggcggcgttgtcctggagcctcataaaaattccttcccgaaaaatagtcttgtgtttgtgctgccggtcagctttgctgtgcttcctgctgcttgcggatatgaaagcggaggcagtccagacgctccagctgcggcctgatatactgaatcgaaagatggaaagctgtcccgacacaatccgcctccgcagctgtcaattctttgataactctggccggaagcccgggcaattcctctctggagatacagtggctctataaagagctgctgaaaaaggaggacgttcaaagcaaagagaaccgctgtaaagcaaaaagacttgtatgcaaaacagtgcggaatcttcgccaaatgccgtcccccgccatggaagtagaggcggaacagtcgctcatccgaacaaccccggccaagagctgcgcacactgcgaaaggtggagcgcaggaggtgaaggacctgacaccggatcagctgacagcgttttttcagaaggccgggaaaagcggcgtgtatgaacgctgctacatggacctggacaaccggcctgcggcggggagagctgttgggattaaaatggacaggcattgacttccagagaaaaacgctccgtatccagcggcgtatcgcccggcagaacgggggaaacgtgaaaacagtctctggaatgatgggccattacagcgccggattcacgctggacacctacgcccacgtcaccaaagacacccagatccaggcggtaaacacggtcagcggcatcctgacagcagcgaggaactgatagtaatggtagaagtagcctgaaatttcaccggcctgtggcgtgatatgggcagagacgaagcgggggaaggaccggagaaaaacagagaagcctgtgttcttagagaacacaggcttcttgctggtacgccctgagggattcgaacccccggccttctggtccgtagccagacgctctatccagctgagctaagggcgcacatcctgtcctgccggacagctttattataatagcatgtctgatttcaaaatgcaagagtttttttggattttttatgttaattttcaaacccttgtaaacgccggggttctgtgctaaagtggagttaaagttttcattcgggaaagagagaagcggaccatggagaactacgcattcaaaagcgtcgcgttcggcggattcgacaagcaggatgtgatccactatattgagcagactgccaaggaggccgccgccgtccaggagaggctgcagaaggagaacgaggacctgcagacagaggcggacagcctgcggacccaggtccgggagctgcagacgcggctggagacggagaccgccctccgggagcaggcccagtccgagctggagcaggagcgcacagcccggcaggggctggaggcattcaagccggaggctgaacggctggccgctgagctggagcggctccggccggaggcggaggcctacgcccagttccgggaccgggtgggggacatcgagtgcgacgcccacaaacgggccgctgagctggaggcgtccaccaccgccaggctgcgccgcacggtggagctgttccgggcccagtatgtgacgctgatgtcctccttcgagtccaccgcctcccatgtgacggcggagctgcggaaagttgaggtcaacctgtctcagctgccccgggcgatggaccaggcggggacagaactgaacgagctggccgccctgctggaccggagcactaagaaagaggaaaaagagccgcggggttgagcaccgccggatctgaacgctcgaatggtgagccggtcgaaaaacatgcattggtcaaagccggattgagcccgcagatcgaccgcaaagacttgggcgcactccgcggataattgcccccgaagctgcctaagataagacgaacggggagactgccctggaaaggaacgacgcgctatagacgaccatccgggtattcctgccgccggcaagcggcggcagggaggccctgaagccatccatttcgcatagagaagccccatgacaggaaagaggtgaagaagatgccactggaagtcatcgagaacatcacacgcgtggaggcggataaccgggagcgcaaggcctccgcagaagcaaaggcgaaacagatcgtcgccgatgcacagcgggacggtcttgcgctcttgcagcagacgcgggctgccgctgcggaccgggggcgggagctgctccgtcaggcggaggcaagagctgcggccagaggagacgagatcgggcaagaagcccaggcggaggcggagcgcctgcgccgtgaggcggagaagcggctggacatggctgccgatctcattgtcggaagggttgtgaaagactgacatggccattgtaaagatgaagaggctccgggtgatcgccatggcagcctgccgggaagagctgctggggcagctccagcggctgggctgtgtggagatccgggagccggagaccgccggggaggactggtccggcctgctggagcgggagagctcccgcctggcggaggccaaaggcgccctggcggaggtgaacaccgccctggccgccatgcggcggtacggacaggtgaaggacgggctgtttgtcaagcgcaggctcgtcacagagaaggagtttctgggcggtggactggaggcgcaggccaaaaccgtcacccaagacgtggggagcggctgcggaccctttccgggatccagaccgagatgtcccgccttcaggctcgccgggcagggctgctgccctggcaggatctggacctgccgctggaggcggagggaacggagcacgtgctctcccgcctggggacctgccccgcgggaacggacgtgggcgccctgcggctagagttggaggcgctgcctgcggagctgctggagatcagcgccgacaagcagcagcgatacctgctgctcctctgccaccgggcggcggaggagccggtaatggaggtcctgcgggcccacggcttcagcgcggctgcttttccgggggtcaccggcacggcggcagcggatctgaagcagaccgaccggcagctggaggagctccagcgcaggcgggaggaggccgaggcggccattgcggagagcgcccgggagcgggacaccctgcggacctacgcggaccggctgacagcggagaccgctcgggagagcgcggcggagcggctgcttaccgacgggaccattgtcttcttcgagggatgggccccggcggagcgcatggcggacgtgagcgccctgctggagcgcctgggctgtgcctgggaggcggcggatcccgcgccggaggagtatccggaggtgccggtgaagctgaagaacaactgtctgacccggccgctgaacatggtgacggagatgtactccctgcctgcctatgacaatgtggaccccaaccccctcatggcgccgtttttcatcctcttctacggcgtgatgatggcggatatgggatacggactgctgatgatgctggcctccgtctttgtcctgcggacataccgcccgaagggaacgatgcagcacttcttcggcctgctgggcctgtgcggcatcagcacctttgtgatgggcgccctgacaggcggtttcttcggcgatttcctcacccagctggcccagctgatccacccggagagcacgttcgccctgccagccctgttcacgccgctggacgacacgctgatgattctggtgggcgccatgtgcctgggctttgtccagatcctcaccggcatggtgatcagcgtggtagggaaactgaagcgcggacagttcctggacgcgttctgggaggagatcacctggtgggtggtcttcgccggaatcgcgctggcagtgctgggggtgacgaacctggtgctgtatgcgggcatcgtgctggtggtggccgggcctgtcatcaacggaaagggattcgggaagatcaccgggatcttcggctccctgtacaaccacgtgaccggctatttcggggacatcctgtcctactcccggctgatggccctgatgctgtccggcagcgtcatcgctcaggtgttcaacaccttgggcgccatccccggcaacgtggtggtgttcttcatcgtctccatggcgggaaacgccctgaacttcgcgctgaatctgctgggctgctacgtccatgacctgcggctccagtgcctggagttctttaaaaacttctatcaggacggcggaaagcccttccgccccctggcggtggatacaaaatacgtggatattcaaaaagactgaggaggaatcgagatatggagttctttgaggcattcggcggtttggcattgggtctgctgggcgctggtctggcagcggtcctctcgggcatcgggtcggccaaaggcaccggcatcgcaggcgaggcgggcacggggcttctgtgccaggatcccagcaagttcggcaaggtgatgatcctccaggtgatccccggcacccagggtctgtacggcctggtggtgtggtttttcgcggtgttccgcatggggctgctggacggcaccgcctttgatatgaccgtgcaggaggggctgcggtatttcgtggcctgcctgcccatggcgttgggcggcctgttctctgccatcgcccagggccgcgtggccgccgggtccatcaacctgctggccaagaagcccgacgactggtccaagggcatggtgctgtgcatcacggtggagttctacgcgatcctgtccctgctggcctccatgctcatgattatcaacatcagcggctgaccctggagaaaggggacagagtatgaacggtatcgacaagatcacacagcggatcggcgcggacacccaggcggagatcgaccgcatcctggcggacgccgccgcccaggcggaggccgcggccgacaagttccgcacccaggcggaggccgaggaccgggacctgctggcaaagagcgagaggaccgcggcggagcgggaggagcgccttgtcagcgccgcccagatggaggcccggaagacgcttctgaccgccaagcaggagatggtggaacgggcttaccagcgggcgctggaaaagctccgttccctgccgcaggaacagtatgtggagctgctggcggcgctgctggtgcgggcgtcctccaccggacgggaggaggttgtcttctccacggaggatcgggagggcgccggcaaggcggctgtggcccgggccaacgagctgctggccaaggaggccgcgccggagctgcccctcggggacggcgtggtagccaatcttctgaacaaggtggccgccggcgtcagcgccttcgcgcagggcacggccatgctggccgtgtcggaggagacccgcgacatctcgggcggcttcatcctgaaggatgggcgcatcgaggtcaactgcacctttgacgccctggtgcgcgcggagcgggagcagaccgccggcgaggtggcgaagctgctgttcccggaggcgtgaggaaggaggcgtcggtttggcaaagaccatcaaggacaccgattacctggtgatctccgcccgggtgaaggccctggagacagggcttctgacggcggagcggatggagcagatcctggatgccaaaagcggcgaggacgcggggaagctcttgcaggagtgggggtatccccagctggatccccggcggccggaggccatggacgcggcattgtccgccgtgcgggaggccaccttggccgacttggcggagggaacgccggacgcccggtatatcgatctcttcaaagtgaaatacgactatcataatgtgaaggccctgctgaaggcggaggctgtgggcaccgccccggaccgtatgctgatggacatgggccgggtaagcaccgccgaactggcagaggcggtccgatcccgggagctggatggcttgccggagacgctggccgcggccgtggtggaggcccgggaggtgctggacaccacccgagatccccagctcagcgacatcgtgctggaccggtggtgctaccgggatatggcggccctggcagaggagaccggcagcgcgttcctccggggctatgtggcggtgcaggttgacgcagtgaacctgcggacggcggtgcggacgctgcgcatgggaaagggggcggacttcctcctgggcgcgctgctggaggggggagacctcgctccggatgcggtggcaaaggccgcctccagcggggccgcgggcctgcgggagctctacggcgccacccgtttccgcgacgccgcggaggcaggggcagaggccctgaagggcggccccctgacggcgtttgaaaagctctgtgacgacgcggtgggggactatctggcgggcgctcagtccgtgcctttcggcgaggcccctctggtaagctatctggccgcacgggagacggagtacacgaacctgcggatcctgctgatgggccgcgccgccggcatcgacccggcggtgatccgcacccgcctgcgggcaagctatgtgtaaggaggcggcgccatggccacaacgtatcggatcgccgtgatcggcagctgggagtccgtcatgggctttcgggccctgggactggagacgtatcccgtcaccgcccccgaggaggcccgggagaccatccgggagctggcaaagagcggcgactgcggcatcatctatctgacggagcagctggcaaaggacctgccggacgtgctggaccggtataaggacgagctgcggcccgccatcatcctgatccccggccgggagggctctctcggcatcggtatgaacaacatccagcagtccattcagagagcggtgggcgcggatatcctctgaggagaacaggctgacgccgctatggcattgcgattttcgaccctgtttgggccgcaatcgcgcctcgtgtgcacaccgtcgggccaagccggtcagcaggtgttgccgcacctgccgaccgggggccttcctcgaaacagccccgcttttccgcctctggcggcgtttcggctgttttccctgagatgtgccggcgggcgaacccgcctgcgctgaattcccgcgccggtctgcacccaaggggatttccgcgccgcttccagcggcttgggcgcggactggtggacgccgccccaggcggctgagtcggggattgttcaccgcatacacgctgcggcggacatgatgaatatttttcttttgccttacggtgggagaactggaaaaaccgcgggtttttccgggcactatttcttggctccggcggttcgcgccggaggtccttccggcgaaactggtgtgaaagaaggttgagcgagtttgagcggtaagattgtgaaggtatccggaccgctggtggtggccacgggcctggcggacgccaatatgtccgacgtggtccgcgtcggcccccagcggctgatcggcgagattttgacgatgaagggggactccgcctccatccaggtgtacgaggagacctccggcctgggaccgggggcggaggtggtcaccaccggcgctcccatgagcgtggagctgggccccggcatgatcgagggcatctatgacggtatccagcggccgctggagaagatcgtggagaaggtgggtgccaacatcacccggggcgtggaggtccccgccctggaccgggagaagaagtgggacttcaccgccgtggtcacccccggcacaaaggtggagggcggcgacgtgattggcaccgtgccggagacgccggtggtgctccacaagatcatggtgcctcccaacatgagcggcaccattacggacatcaggagcggctccttcaccgtggaggagaccgtggccaccctgcgcactgacaagggggaggacgtgcccctgaccatggtgcagaagtggccggtccggatcgggcggccctacaagcacaaatatccccccaagcggccgctgtgctccggccagcgggtcattgacaccctgttccccattgccaagggcggcaccgccgccgtgcccgggcccttcggctccggcaagactgtggtgcagcaccagctggccaagtgggcggatgtggacatcgtggtctacatcggctgcggcgagcggggcaacgagatgaccgacgtgctccgggagttcccggagctgaaggacccccgcaccggggagtccctgatgaagcggacggtgctgatcgccaacacctccgacatgcccgtggccgcccgtgaggcgtcggtctacacgggcatcaccatcgcggagtacttccgggacatgggctacgacgtggcggtcatcgctgactccacctcccgctgggcggaggccctgcgcgagatgtccggccggctggaggagatgcccggcgaggaggggtaccccgcgtaccttgcctcccgcctggcccagttctacgagcgggccggcagcgtggcctgcatcggctccgatgaccgccggggcagcctcaccgccgtgggcgccgtgtcgccgccgggcggcgacctgtccgagcccgtggcgcaggccaccatgcggattgtcaaggtcttctgggccctggattcgtccctggcctacaagcgccatttcccggccatcaactggctgaactcctactccctgtatctggactccctgaagccttggtttgacgagaacctgggaccggagttcctggaggaccgggccagcgccatgagcatcctccagagtgaggccagcctgaacgagatcgtccagctggtgggcaaggacgccctgtccccggcggaccagctgacgctggaggtggcgcggatggtgcgggaggacttcctgcagcagaacgcctttgcggatgtggacagcttctccagctacgaccggcaggaaaagctgctggccatggtcctgcggtacgaccggctgtgccgggaggccatctccaagggcgcgccggtggcgaagctcttcgccgttccgtcccgtgagaagatcggccgggccaagagcgtgccggctgaggagtaccagcaggtctaccagcagatctccgcggagatggagcaggagatcaccgccattgcggaggaaggaggagaggacgcatgatccgggaatacagaacggtagaggagatcgctagtcctctgatgatcgtccgcatggtggacggcgtcacctatgacgagctggtggaggtggagctccacgacggctccgtccgccggggccaggtgctggaggtcaacggcgacaccgcggtggtgcagctgttcgagtccgccgccggcatcaatctggcggacgccaaggtccgcttcctgggccatccgctgcagctgggcgtgtccgccgatatgctgggacgggtgttcaacggcatgggccggcccatcgacggcgggccggagatcctggcggaggagtaccgggacatcaacggcctgcccatgaacccggcggcccgggactaccccaacgagttcatccagaccggcgtcagcaccatcgacgggctgaacaccctggtccgcgggcagaagctgcccatcttctccggctccggtctgccccacgccaatctggcggcccagatcgcccggcaggccaaggtgatcggagacgacacctccaagtttgccgtggtgttcgccgccatcggcatcacctttgaggagtcggagttcttcgtcagcgagttcaagcgcaccggcgccatcgaccggacggtcatgttttcgaacctggccaacgacccggcggtggagcgcatcgccaccccccggatggccctgaccgccgcggagtatctggcctttgagaaggatatgcacgtgctggtcatcatgactgacatcaccaactacgccgaggcattgcgggaggtctccgccgccaagaaggaggtccccggccgccgcggcttccccgggtatctgtacacgaacctggccaccatctacgagcgggccggccgccagctggggaagaagggctccatcacgctgatccccattctgaccatgccggaggatgacaagacccacccgatccccgacctgacgggttatatcaccgaggggcagatcatcctcagccgggagctgtaccgcaagggcatccacccgccggtggacgtgttgccgtctctgagccgtctgaaggacaagggcatcggcgagggcaagacccgggaagaccactccggcaccatgaaccagctgttcgcggcctactccaccggcaaggacaacaaggaattgatgtccattctgggcgaggcggctctgacgcccacggacctgctgtacgccaaattcgccgacgagtttgagaagcggtatgtgaaccagggctacgaggagaaccgttccatccaggagacgctggatctgggctgggagctgctgagtatcctgcccaagagcgagctgaagcggatcaagccggagtatatcgaaaagtactggcccaagaaggagctgtgagccccttccggggaccccgggattttggcggccgccctctcttggctgcggcccatgatgaggatttgccgcgcgtctgctgcggcgcggaggcgccgggccgctgaccgcgggcccccaggccaggatggaaagaaggcgattgacagatgcccaatatcacggtcaaccccacccggatggagctcacccgcctcaagggcaagctccgcactgcccagcggggccacaagctgctgaaagacaagcgcgacgagctgatgaagcagtttctggacacggtgcgggaggtccgcgctctgcggcaggaggtggaggaggagctgatgacagtccacggcgccttcaccgtggcctccgcgctcatgagttcccaggcgctggaacaggcgctgctggaccccaagcagagtgtgaagctgacgcagaccaccaaaaatatcatgtcggttaacgtgccggtgtatgatttccagacgcagacccggtctgacgcggacatctacccttacgggttcgcggccacctccggcgagctggacacggccgtggacgccctgggaaaggtgttccggaagatgctgaagctggcggaagtggagaaatccgcccagttgatggcggaggagatcgaaaagacccgccgccgggtgaacgctctggagtacgtggtgatcccaaacacccaggacgccatccggtatatcaccatgaagctggacgagaacgaccgggccaccaccacccgtttgatgaaggtgaaggatatgctgctgcagcagtccatcgaggaacagcggcagcgggacgcggaagtgctggagcggttccgggaggcttgacgaaatacgcaaagcggtgtaggataataacgctacaccgctttgctgcgtttaacgcgttagaaaggaagaaaagcaactatgcattgcgtgacaaacatccacgaggacctgtactggctgggaggctctgaccggcagctggcgaagtttgagaatgtgtttcccattccccggggcgtcagctataacgcctatctggtgctggatgagaagaccgtcctgctggacacggtggacaaggccgtgggggagcggttcttcgagaacctggagtttgccctggccggccggcccctggactatgtggtggtgaatcacatggagccggaccactgcgccaccctgggcgagctgctgcgccgctggccgggcgcccaggtggtggccaacgccaagactgtccccatggtcagccagttttttgactgtgatatctccaaccgggctgtggtggtgaaggagggggataccctctgcaccggccgccacaccttcaccttcctgatggcccccatggtccactggccggaggtgatggtgacctatgacgccgccgacaaggtgctgttctccgccgacgccttcggcaccttcggcgccctgaacggcaacatctttgccgatcaggtggactttgagcgggattggctggacgatgcccgccgctactacaccaacatcgtgggcaagtacggtgcccaggtccagtccctgctgaagcgggccgccgggatggagatccagatgatctgtcccctccacggtcccatctggcgggagaatctggagtggttcctggagaaataccagcgctggagcacctacacccccgaagatcggggcgtggccatcttctgcggctccatctacggccacacggagaacgccgcggagatcctggccgcccgcctggcagagaggggcgtaaagaacatcgccctgtacgacgtgtcccatacggacgtgtcctaccttgtcagcgaggccttccggtgcagccatctggtgctggcttccgctacatataacggggagatctacacccctatggagaacttcctgcgggatctggcctgccacggtctccggggccgttccgtggccctgatcgagaacggcacctgggccgcccgctccgggatgctgatgaccaagctcctggaggagatgaaagagatgcgggtgatggaggggaccgtgacgctgaagtcctctgtcaaggaggcccagcgccgggggctggagtccttggcggacgccattgccgacgagctgctccactgagaggatgagaaaatacccctgccggagttccggtgggggcattttccgtttcaaaggcccgaaaggggcggaaaaagccgcccgccgtgatctgcggcgggcggcttttctgtatggtaactttactttacaacagcgtgataccagcatcttcacatgttttcgtggtgtcagcatcccacaggctcacctgaacctcgccaatgtggcaggtgccgatcagcagcatgcacagccgggactggccaatgccgccgccgatggactggggcagctggccgttcagcagcatcttgtggaagggcagctcccggcgctggttgcagttcgcggcggtcagctggcggtccagagccgcggcgtccacccggatgcccatggaggacagttcgaagctccgctccagaatggggttccacatgaggatatcgccgttcagctcccaatcgtcgtagtcgggagcgcggccgtcatggcgcttgccggaggccagggtcttgccgatctgcatcagaaacacggtgtgatgcttgcggcagatctccacctcccgctcgttgggcgtcaggtcgggatagcggtcctccagctcctgggtggtgatgaagtacacgtcccggtccggcttgaaggtcagggcagggaaggcgttgcgcagggcagcggaggtgtcgcagatggcgcccacgatgtcgcgcaccgtctccttcaggtacagcacgttccggtctttgggagagatatgcttctcccagtcccactggtccacatagatggagtggaggttgtccacctcctcgtcccgccggatggcgttcatgttggtgtagaggcccgttccctcggggaactcgtaccgcttcagggccaggcgcttccatttggccagggagtggaccacctggccgtcggtgcccacatcggggatgtcaaaggagacagggcgctccacgccgttcaggtcatcgttcaggccggtgcggccgtccacgaacaggggggcggagacccggtgcaggttcaggcgcacacaaaggctgtgctgaaactcctggtggatcagctcgatggcccgctggagctcgttgttgctgaggggcatccggtagccggaggggatggtggttttactcatagtcggaaatgcatcctttctgtggattgtgattcagaggaacagccccgcggcgaggggcgtcacgtaggcctccgtcagcgccgccaggatcagcagcggcagcagaaggaagaccagcagccgggccgccagccccaggcacgcgcccagaggaagagcggccggatcgcggcggcagcggcgggtcaggtgcccgcagatgtacagccccatggaaaaggccaggatcaaggcgggcagctcgaaaatcccgtggggcagcaggctggcggcatacagcagcatggtggtgtccgtggcggcatagcaggcggcaaggccgcccagcagcaccgcgttcacgcccagcgccagggccgggagacgcacaaaagggatcagcccatagagcatggtgacggcacaggcccgcagattgttggccagcagcagaagcggggagaggttcccggccccgtccgtcaggtccatgccctggaacaggtgctggagataggcggaaaagccgagccgcagctccggcaccgccagacacacgccgaaggccaggaagaccagcaggaaaaaggcgatggcggcgcgccggacctcggcctcatatccgttccgccaggcccggagcaccggggcgaactgggccgccagaaaccgcctcatgcccggagcttgtccaggcccagccgcaggcggcgcagggtctcatccttaccaaggatgtggcagatttccacggcgccgccgggggtcaccagcttgccggccgcggcgatccgcaccggccacatgagggtggcgttcttcacgcccaggtgttccgccagggcgatcagggtgtcgtggactgcgtccgccgtccagtcgccgatgccctccagggcggggatggcggcctccagcatggcctgggagacctcgggattcgtcttggatttcttgttggtgaagcactccacgccgtagtccggcagctggtcgaagaaatccaccttctccgggatctcggtcagcttctcacagcgggcctggagcagggcggccacggcggacacatcaatggcggggttcttcacggcctcacggatatagggctccgccgctttggcgaagtcctccggcgccatggcgcggagatacgtggcgttgaagtacgtgagcttgtcgatgtcaaaaatggcgggggacttggagataccggcgatatcgaaggcctccaccagctcgctgagggagaagatctcctgctcgctgcgctcgcccttgggggcccagcccagcagagccacatagttcaaaatggcctccgtcagatagccctgggccttcaggtcctcgtaggaggggtccccgtggcgcttggacatcttgttgtgctggtcccgcataacgggggagcagtggacgtaggtggggatgtcccagccgaaggcctcgtacagcagattgtacttgggggcggagctgaggtactcgctgccccgtaccacgtgggtgatgcccatcaggtggtcgtccaccacattggcgaagttgtaggtgggcaggccgtcccgcttcagcagcacctggtcgtccagggtcttgttctccacggtgatgtcgccgaaggacacgtcgtggaaggtggtggtgccctcgtgggggatccgctggcggatcacatagggctcgccggcctccacacgctgtcgggcctcctccggggacagatcccggcagggatcgtcggcgcggtcaaagtcaccggcgtcctcctcggatgcggccttctcgcagaagcagtagtaggcggcgcccttttccaccagcaggtgggcgtagggctgatacaggtcccggcgctccgactggatataggggcccacggggccgcctacgtcggggccctcgtcatgggtcaggccgcactccgccatggtgcggtaaattacgtccgtggcgccctccaccaggcggccctggtcggtgtcctcgatccgcaggatgaacgtgccgccggcgtgccgggcgatgagccaggtgtacagggccgtccgcagattgcccacgtgcatatagccggtgggagagggggcgaaccgggtgcggaccttccccttggggatgcgggcctccatctcctggaaaaagctctgatccaatgccatgcaaatacctccatatcgggtaaattacaaaaataacaacgtacattatcccctgaaacccttggaatgtcaagggctgattgtgtccggcggcacacgggcgccggacgcgggggcagggtgggggcggtatacatccgctccgggagatggtcgtccccggtgaccatggtcagaaacgtccagccgtaccgctcgtaaaaggcggtgtggtccgtcaccaggtagagccgggggatccccatggcgcccaggtcccgccggatgaagtccagcaggcgcccggcggtcccgcggccccgccaggggggctccacaaacagggcgcagagattgggcgtcaggtccttccggtcgtggaagtcgtttgcgatgacgccggccccggccagcaggcgcccgccgtcccggaccacgtaccactggggaaccggcgccttccggcggaggcactgctccatgctctcccggtaggactccgccgggattccccagcggcggctgaaccagacggcggccgcgtccgccaggacgggcgcgtcccgcagggggagaatgggctgttccatacggctcctttctgagactgcgaatatacagcaaaaaatcccgaaccgggtggttcgggatttcgtttgtccatgtcagaccgctctggtgaccttgccggaacgcatacaccgggtacaaacatacacatggcggggagagccgtcgacaattgccttcacacgcttcacattgggcttccacatccgattggaacgccgatgagagtgagagaccttgatgccgaacgtaacgcccttatcgcagaactcgcacttagccatccgttgcacctccttgctgttgcgtacttccatgccatctgcaggcacaactggtatcataacagaaaagttttgaaaatgcaagtaaaattttcaaaaaaacacaagcttttttcaactgtacgccaagggggcgtcagcgcaccgccgcttccccggcaaataccgccgcaacgccgaggatcaggcttgccgccgcatagagcagggccgccgccgtgcgcccgctttgcagaagatctccggtttccagggcaaaagaggagaaggtggtgaagcccccgcacacccctgccttcaggaagagcaccagcctggggtcgggggcggcccgcttcagggccagcgccgtgacggcgccgatgagaaaggagccgatcaggttgatggcaagcgtccggacgggaaagccccagtcccttcccagtggaatctgcccagccagataacggcacacggaccccaggaatcccctaagccccacggcaatacagttcagcatggacgccacgctccttttcatgtcatctgtggaaataccaccggccgcacctatggtaacacaaccggcggccggaggcaagagcccgccccgctccgacagaccggccggattcggccgcgggcacagggcccgaccgggaaaccggcagctgggtattgcgcaagcggtgagattcatatataatagagttacttccgcacaccggagcgcgggtgcggcgatccatccaccgcgccgggcgtgggcccggcctgggagaaaaccggcgtcccagtcccgggcgccgcaagaaaaggggaggacacgatgcaagaacatggcctgaagatctcggagctggtcacactcttcaatctggaggtgctgaacaggggcagcgactatgacacggcgctgctcactatcacggacgtgaaccgtcccggcctccagtttcatagcttctacgactactttgacccccgccgcctccaggtgctgggcaaggcggagatcacctatctcaaggggttgacgacggagcagcggcgcaagtgcttcgacgacctgtttctttacgacatcccggccctggtgatctcccgggggctggactgcttcccggagtgcctggagagcgcccgggtccacgagcggacgctgctgcggaccgaggagaccaccgtggagttcaccagccacaccatcgagtatctgaaccgggtgctggcgccctgcgtcacccgccacggcgtactgctggacatctccggcgagggcgtgatgattaccggcgactccggcatcggcaagagcgagtccgccattgagctcatcatgcggggccaccggctggtggcggatgacgcggtggagatccgccgcatctccaaccagctgatcggcaccgcgccggaggtgatccgccattatatcgagctgcggggtatcggcgtcatcgacgtgcgccagctcttcggtatgagcgccatcatggaggaatcccggatcgacctggtggtccagttcgagcagtgggacgagacgaagttttatgaccggctgggcattgaggatcaccacatcgacatcatgggcgtggagatcccctgcgtcaccatcccggtgcggccgggccggaacctggccagcatcgtggaggtggcggccatgaacaaccgccaccggcgttacggcttcaacgccgcccaggagctggcccagcgggtggacctgcgggcggagcagggcagccggaaacagaaatgagcggattcttcatcggtatcgacgtgggcggcaccaacctgaaggcgggcctgacggacgagacgggccgccttctggcggcggcgcgccgccccctggacttccgggggcggagacctttgcggcggacctggcggatctggcggcggaggtgctctccaccgccggagcggtgcccggggacgcggagggcgtgggcatcggcctgccgggggccgtctccggcggagaggtgctgtacaccaccaacatccccctggagcggacggatctggcggccctgttccgccggcggctggacctgccggtgctgctgggcaacgacgcggactgtgctgccgtaggggagtatttccagggcgcgggccggggtctgcgggacttcgtggtgctgaccctgggcaccggcctgggggccggaatcattctggacggccgcctgcggggcggcgaatcctccagcgaggcggggcacatggtgctccatgccggaggagagccctgcccctgcgggcgcaggggctgctgggaacagtacgcctccgccacggcgctgattcgccggacggaggcggccatggccgcccatccggagagcgccctctgccgtctggcagaagaggccggcggcgtggacggccggacgccctttctggcggcagaggcgggggacgagacggcccttgccgtctgccgcgcctatgtggaggagctggcggagggcacggccagtctcatcaacatcctccggccggaggcggtggccttcggcggaggtgtggccggggcgccggagcatctgctgctggagcccctgcgccgccgggtcggggcgctgtgcttctcccgccacggcgggcgggccacccgcatcctccgggcggagctgggcaacgacgccggcgtcatcggtgcggccctgctgggccgggtaatctgaagtatgaggaggtccagaaatggactggtggatcacatttgaccagcaggcggcggattatctgccggacctgcggatcgagaaggaggagcccatggaccggcacacctccttccgcatcggggggccggcccggcgcatggcttttccggagcggggagagcagctggtgctgctgctggacatggccgcccgctgcggcgcccgtcccctggtgatgggcaacggaaccaacctgctggccccggacgaggggctggaccggctggtgatcgacacctccgccggcctgagccgagtggaggccggcgggacaccggggaccattctggcggaggcgggggcctccctggcccgggtggcggatttcgcctgccggcaggggctggcgggcctggaattcgcccacggcatcccgggcacggtgggcggcgcggtgtgcatgaatgccggcgcctacggcggggagatggcccaggtggtgcgggaggcaaccctgctgctgccggaggagggcatccggaccctcaccggggcggagatggccttcggctaccgccgcagctttctgacggatcacccggatgcggtggtgctgcgggcggagttctgcctgacgcccggcgacccggcggcaatccggggccggatgaaggagctgctggaaaagcgcagggccagccagccgctggagttccccagcgcgggcagcaccttcaagcggccggagggctattacgccgggacgctgatcgaccaatgcggcctgaaggggctgacggtgggcggcgcccaggtcagcgagaagcatgcgggctttgtcatcaaccggggcggcgccacctgcgccgacgtgaaggagctgatccgccagatccaggagcgggtctttgcgcaggccggcgtccggctggagccggaggtccggatcatcgactgagaaaggggcggtgcggacatggaaatcctcatcatctccggcctctccggggccgggaagagcaaggcggcctcctttttggaggacatgggcttttatatcgtggacaatatgcccgccgccatgatcctgaaatttgcggagttctgcgccgggggcaacggccgctacgaccgggtggccctggtgtacgacgtgcggacggccagctccttcacggagctgttcgacgtgctggataagctgaaggacatggaggcccagtgccggatgctgtttctggaggccgcgccggaggtcatcatcaagcggtacaaggagacccgccgccgccatcccctggcggcagacaccgactccctggaggaggcggtgaagaaggagagggccatgatggcccccgtcaaggagcgggcggactttgttatcgacacctcccgcacctccaccgcccaactgcggggagagctgctgcgcctcttcggccaggagggggagaaggggggatgacggtgagcgtcacctccttcggcttcaagtacggcctgcctctggaggcggatctggtgtttgacgtgcggttcatgccgaatcccttctatatggaggacctgcgtccccggacggggctggaccaggcggtggcggactatgtgttccacttcccacagacccaggactacatgcgccgtttggaggacctgctggccttctccctgcccctgtacgcggaggagggaaagacctctctcaccatcgccgtgggctgcacggggggcaccaccgctccgtggcggtgacccatgccctggcgggcttcatccacggcctgggctatcaggtgctggagaaccaccgggacatgacccggggaggctgagccgtgagggagcaggaataccgcgtcccccgggcccatggccccaaggtggccgtcatcggcggcggccacggcctgtccaacatgctgcggggactgaagcaatatacggagaatatctccgccatcgtcacggtggcggatgatggcggcggctccggcatgctgcgccaggacctggggatgcctccgccgggggacatccgcagctgtatggaggccctggcaaacacggagccggtgatgcgggagctgctccactaccgcttcaccgaggggagcctggcggggcagagcttcggcaacctgtttctggcggcgctgaacggcatctccccgtcctttgacgcggcggtgcgccgcatgagccaggtcctggccatcaccggacgggtgctgccggtgaccacggcggacgtgcagctggaggcggaatttgagaacggcgccacggtggtgggggagtccaagatcttttactgcaaaaagcaggaggactgccgcatccgccaggtgcgtctgatcccctcccggcccaaggccctgccggaggcggtctccgccatcgccgacgcggatatgatcgtcctggggcccggcagcctgtacaccagcatcatccccaatctgctggtggatggcatcgtgaaggcgatccgggagtccgacgccctgaaggtctatgtctgcaacgtcatgacccaggagggggagacggagggctacaccgtatccgaccacatcgccgccatcttcgcccattcggcgcagggcctgttccgcctgtgcctcaccaactcctcgcccatccccaaggcggtggccgcccggtacgcggaggagggggccgagcgcatccgatgcgacaagtccgcctgcgcggccctgggcgtggaggtcgtggagcggccggtggccacggtggagagcggctttgtccgccacagctccgcggccctggcccgggagctgatcctgctccatgcggagcggagcgtccggatcgccggtgcccgattccgcccccgggaggactcctaccagatggaggagcagaaatgagccccacaattacccagagttggaggagacccacccatgtccttttcctttgaagccaaaaacgagctgtgccgcctgccggtgcagaagctgtgctgcgcccgggcggaggcctacggcatcctgctgtactgcaacaccttcagcgcaagcgaggtgcggatcatcaccgggaaccccgctctggctgcccggcttcccaagctgtttcaccgggccttcggcctgcggttcgaccggctgccggaggagggggagagcggcaagctggtgttccagatcacagacggcggcaagctccgccggatcgtggacctgctgggcttcagcccggagcagaacctggccctgcacatcaacttcggactgctggaggaggagtgctgccgggcgtccttcctgcggggggtgttcttcgccgggggcagcgtcacggacccggccaagcggtaccacctggagctggcgacctcccacctgcaggtgagccgggagctggaggtgctgctgcgggagtgcggctatccccccaagagcgtggcccgcaacggcagcttcatcacctacttcaagcagagcgaccagatcgaggacttcctgacgctgatcggtgcgcccgtggccgccatgagcgtcatgtccgccaagctggaaaaggacctgcgcaacagcgttaaccgccgcctcaactgcgacagcgccaatctggacaaggcggtggaggcggcccaggaacagctggaatcgatccggaagctccagcgggcgggcctcctggaccagctgccggacaagctccagctgacggcggccctgcggctggagaatccggagctgaccctcagtgagctggcggaggagtttgacccgccggtgaccaagtcctgcctgaaccaccggctgcggaagatcacccagctggcaaaagggctgtaaagtaaatgcgctttacaatttatcaaagaaaagttggaggaatatacaatggatcgctgtgcggcagcctatgcatatcacaaacaggggtataactgtgcccagtctgtggccggggcctttgcggacctgacgggcacggcgccggagcagctgatggccgccatgggcggcttcggcggcggcgtgggcggcagccatgaggagctgtgcggcgccgtcagcggcggcgtgctggtgctgagtctgctgcacccccatacggacggagaggacagggccggaaaggtgcgcctctacgcccaggccaaggagttccgccgccggttccaggaggtgttcggcctgacccggtgcggagacctgctgcgggcccggcccggcgtcacagagaggaacccggcctcccagcggctgggagtcaccgcccactgcgacaacatgatcgtcacggctgtggagatcctggagcagatgctgcaggaggagcccgcatgacctgggcagagctgtattcagaggctgcgcggcccacgctggaggaaatcgacgcctatgcgcatacgcccctttggccgcagctgcgcgcgtatctggcggcggcctatggagcgggaccgcggctggagtacagccggtgcggtctggagccgggatggaatgtgaagttccgcaggggcagcaagtctctctgcacggtctacctgcggcctgggtttgtgacggccatggtttctgtcgcgcccaaggatgaggaggccgcccagatggtcctgctcacctgcacggcagagacacaggcggtctaccatcggtccgctgcatccaaaatgggccgctggctcatgctggacatcacgtcaccggagatgctggaggatgtgaaagctctgctggccgtgcgggtcaagcccgcagagtgagcaccccgccctttgcaaggacggcgcgtgcgattttggaaaggaacatgctatgtcttttgtccatctccacgttcatacggaattcagcttattggacggcgcctgccgcatccgggacctgcccggcatcgtgaaggccatgggccagaccgcctgcgctgtcacggaccacggcgtcatgtacggtgccgtggacttttaccgcgcctgcaaggcggagggggtcaagcctatcatcggctgcgaggtgtacgtcacccccagggccggacccggttcgacaaggtccacgagctggacgcggagagccgccatctggtgctgctctgcgagaacgaggagggctaccggaacctgtcctacctggtgtccatggggtggacagagggcttctatatcaagccccggatcgacctggagctgctgcggcagtacagcgggggactgatcgccctgtcggcctgcctcgccggggagatcccccggcggctgcggaacggggagtacgagaacgccaaggcctatgccctagagctctcccacatcttcggcccggaccgcttctatctggagctccaggaccacggcatccgggaccaggccatcgtgaaccagggcatcctccgcatccaccgggagacggggctgcctatggtgtgcaccaacgacgcgcactacctccggaaggaggacgcggaggcccacgatgtactgctgtgcatccagaccggcaagaccatcgacgacgagaaccggatgcgctatgagccccggaacttctacctccgcagcgaggaggagatggcggccctgttcgcgggctacgagggcgcgctggagaacacgtcgaagatcgccgacatgtgcaatctggacttttccttcggcaagtaccacctgccggaattccggctgccggaggggtacgacagcttctcctatctgaaaaagctctgcgacgagggctatcgggagcggtatggaacggacgaccagtaccgggaccagctccggtacgagcaggacatgatcgagaagatgggcttcaccgactacttcctgatcgtctccgacttcgtccgctatgccagaagcgcaggcatccccgtgggtcccggtcggggcagcgccgcgggcagcatggtcagctactgcctccacatcacggacatcgaccccatgaagtacaacctgtacttcgagcggttcctgaacccggagcgggtcagcatgccggatatcgacatggacttcggcgacacccgccggggcgaggtggtggactacgtccgccggaagtacggggatgaccacgtggcccagatcgtcaccttcggcaccatggccgcccggggcgtgatccgggacgtgggccgggtgatgaacatgccctatgccgacgtggacgtgatcgccaagcaggtgcccgccgggcccggcgccctccacatcaccctggacgacgccctgcgcctgtccaagcccctgcgggagcagtacgagaccgatgagcaggtgaaaaagctcatcgacaccgccaaggccctggaggggatgccccgccacgcctccacccacgccgccggcgtggtcatcaccaagcggccggtgtacgagtacgtgcccctggcgaagaacgacgacgccgtggtgtgccagtacgtcatgaccaccctggaggagctgggcctcctgaagatggacttcctggggctgcggaacctgacggtgctggatgacgcggtgaagatggtccaggagcgcctgccggacttcaagctctcggacatcccggaggacgacccggagacctttgagatgatctctgccggcaagacctccggcgtgttccagatggagtccgcgggcatgaccggcgtgtgcgtgggcctgcggccccagaacatcgaggacatcaccgccatcatcgcgctctaccgccccggccccatggactccatcccccggttcatcgcctgcaagcatgactccagcaagatcaagtacctccacccgtccctggagccgatcctctccgtcacctacgggtgcatcgtctaccaggagcaggtgatccagatcttccagcagctggcgggatactctctggggcaggcggacatggtgcgccgggccatctccaagaaaaaggccgcccagatcgagaaggagcgggaggcattcctccacggcgatccggagcggaacattgcgggctgcgtggcaaacggcatcccggaggagacggcccaggccatctatcaggatatctacgactttgccaactacgcgttcaacaaggcccacgccgtctcctacgcggtggtggcctatcagaccgcctggttcaagtgccactacacccgggagtacatggcggcgctgctgaccagcgtgctggacaactccgataaggtggcgggctacatcagcgagtgccgggactgcggcatcgccctgctgccgccggacatcaaccgctccgccgaccggttcaccgtggaggaggggggcatccgcttcgggctggtggccatcaagaacatcggccggggctttatccaggcggtgatgcgggagcgggagcaggcgcccttcacgtccctctacgacttctgcgaccgaatggcgggcagcgacatcaacaagcgggcggtggagaacctgatccgctccggcgccttcgatgccctgggggccaggcggtcccagctgatccaggtgtacgagtccgtcatggacgcggtggcggacagccgccgccagaacttggaggggcagatggatttcttctccctggcggacggcagcagcggcgggagaaagaatgtgaaggaaatccccttgccggacatcgacgagtacaccccgaggaacggatgctgatggagaaggagaccacgggcctctatctctccggccaccccatggaccagtaccgggaggcggtgcggcggctgggggcgcccactatcggctccattctgggagacttcgcccaagagggcggccccacacggttcgccgacgaccagcggatcaccatctgcggcatcgtcacctccagcaagacgaagaccacccgcaacaactccctgatggcctatgtgacggtggaggacgacaccgcctccatcgagctgctgtgcttcgcccgggtgctggagtcctgcgggccgtacctgaaggagaaccaggcagtggtggtgaaggggcggctctccgtccgggacgagaaagcgccccagatcctctgcgacagcgcgtatccgctctctgccgcaggcgctccggcggcggaagggcaggccgcgaaagcgccggatcaggtgctgtacctgaagttccctagcctggaccaccccagcgtgcgccacatgaagctggtgttccagatgtttcccggcaacgccgctgtgaagatggtgatggcggacacccgcaaggtctacggcacccatgcaagcctccacgaggccctgctgcaggaggcccgggagacgttgggagaggccaatgtggtggtgaaatagaacggaacgcccgtgtccaaaaggacacgggcgtttttcattcacaagcgccgtttcagcttcaagaccagctccacaaccccggcgcccagggtcaggcaggcggcctggatggtccagagcattggcccttcactgccggggatggggattgtgctggcccagaggaaaaggatcagggccaaagctgccgcccccgctgtcagcagccagccgcgccgccagcggcgcagcagccagcggaacagcagaccggccagaagggggaagaccgcgacgagcatccagttccatacgatctgaagcaagagaatccctccttatctcccaaaacgggccgacaggccgtggagcggggacccggcggccaggagaaggagccccctcgccgcccctccttacggggcctcgtcctcgggctcggaggacatcagggcccgcatgatctcgccatacagccgctccggggatttctggaaccgctccgtcagcatggcggccatgtcctcccgggggatggccagccgcaggtccatcacgctgcccatgtcgtccgacagctccagccgcaccgtgtaggtgccgttgggccgcttctccgtggaggccttcacctggctcttgcgccgcaggtggcggttgcaggccgccaggttcttgtcgcaccgcagccgcacggagtaggggaggctggactcgcagatccggctgttccgcaggcccttgtcggtgatggcgtacagcccgtccgcagacagcgtcagatgctcagtccgcaccagatcggagaggcactcggcaaagtcgaaatagtccacgccctcgtcgcacatggccagatcccacacggtatcaaagggaatcggctcgatcacccgggcggtgatatacagaatcagaaacttgatctccagcttgtcatggataaagccgggcatccgcgtcacctccttggaatgggattggatacaattgtattataccgcaggaccgccgggtttgtatagtccgaatttccccgccgccgcaccaatgggagccgggcgcatacactggattgaaagagcttctctttcatccagctacttattaggaggtattgcaatgcccgagaaagttatgcccggtcccgtggaggactcctgcggcatccgggaggcggtttgcatccataccaggaagatttttgattcctgccgcgataaggactgcatcgaggacctgcggttttaccccaagctgcagtgtgtggacatcatcaaccgcgccctgtccgtgaagggcggcagcgccaagctgctgtacgtctatgtggatgtggagcccgtcagcttcaaccggggcttctacaccgtggatatgcgcttcttctaccatgtgacgctccaggcctatctcagctgcccggtgccggtgacggtggagggcctgtgcgtctttgacaagcgggccatcctgttcggcagcgaggggaacgccaagatcttctcctccgagatgcgggccggagagccggatccccagatgatgcagcggtccaacacgcccatcgccgtggtggaggccgtggaccccatcgtgctggacgcccgcatcatggactgctgctgcaagcgggactgcgactgcgacctgtgtgaaatccccaccttcgtgggcgactgcttcggcggggagctgtccagcggggacgacagccgacggatctatgtgaccctgggccagttctccatcgtccggctggagcgggacacccagctgctggtgcccgtctacgactactgtatgcccgacaaggagtgcgcctgcggcgacggctgcgaggacccctgcgctctgttccggaacatctccttcccggtgggcgagttcttcccgcccaacaccgtcaagcggccggagagctgcgacgacatcaagagctgctgcaagtgagcggcagaccaacaggaccccggctgcttgccggggtcctgttttgctacatcctgtgccggtaccagagggtgaggccccattccagaagcccccaggcgaggcagaacccaaccagcccccaggtgatccacatgggcagctccagaaagcgggcataggccgcgccgaaatacaggaccgcgccctgcatgacccgggcggcccgggccgccgccttttcgcagatcatggtgttccgctcgtcgtgctgttctttgtaagcctgaacgagtaccgggtcgcgaatccgaatgacccgacacagcagggagccgagggaaccgcccaccagtacggacccacccgcagccagcagagcaaagacgggcttggggagatgctgggggaattggagcgggaccgcgcacagcagaagccccgccgcgatcaacagcagataccagcgctttttcatcccggcgcaccccttacatctcccgctcgtagcggatcatgagatacagctccagcacggatttggctacgaagacaccggtggcagccagggggacccacaggggcgcatccaggccgatggagagccatgccgccgccagaacgttccactggaggacctcgccggacacggccttggcccggttccggatagccacattccgctcgtctttttgttcgatgtcgtgctgccgggccatctccgggtgcttcgcctcgtggcggaggttcagcagggtggaccccgccatggccagcaggccggagcctatgccgcagagcatcccgcccagggaatcgggcacccggccgtccagcagcagggacaggaccagcaggacgatgcccatggccagaagtccctggaacaggcgctttttttgtgtgcggttcatacagagtccctccttcaatactgacggcggtaccagacggtgaacatccagtccagaagcagttttacgcaggccaggcccagcagggtgatgttgacccacttgggcacgccgaagaagtacaggtaggcagcgccgaacagcagcagccacagcagcacgtccccggcccgggccctggccatggcccggatcatggcgccccgctcgtcgtggtcctcccggtcccgctcccgccgggcggggtccaggtctcgggtggacagcagctccgccatggcgcagaagaacaggaggccgcctgcaaggccaaaaaaccccggcacagcggcgggagcggcgggaaacgtccgcgccgcccagagggcggcccccgctagcagcgcccccgccgcggcggccgagagataccagcgtgtgttccgcttcatgacagcgcctcctcacatcttccgctggagccatttgtaaagccccaggaacgccaaagtgtaaaacagatagatgccgatgaacacccagcccacccagtcgggaatgccgaaccgttcaaagctctggaaaatcaggccggagaccaccagcagtccgacggtccaaaatccggcgatgcagccggcccggtcccggatggcctggttccgctcgtcgcattgggccttctgcctctgccggtagtccgggtcccgggagagccgtttcagctggagcaacgtcccggcgcaggtgccgaacagcaccgccccggccatacccagcagggaggccgcgccgccggagagaccgggcgcacccggcgcattcaggacgaacatcgggatgcagcagagcagccccgcgattgccagggacatcaatatgacctgcttcttcatgtgccatcctcctcatagatgaaaatgtcctcaatggtggtgccgaagtaccgggccagcttgaaggccagcaggatggaggggttgtaccgcccgttttccaacgacccgatggtctggcgggacacctccagcgcctccgccagctcctcctgcttgatccccctggccttgcgcagcgcctccaggcggtttttcaagggcgattccccctttcatacgccccatccgcttctgacggatggaaagtttgctttccgtcttcaacttagcacacttccggtaccatgtcaagtacgctttccatttttccgggcttgtcccatttttccactgagggagtcatatccggggacaacccctcatagagtatagcgtgttacgaaagggggcgcggcccgtgaaggaggaagaacgccgctatgaggaggcggcccgggtgctgccgggccgcctgcgggaacaggctctggcccagccgccggaggtccggcagatggcggaggagttccgcctccgggcggggcagccgctggcggtgctgctgccggagggggagcggtccctgggggccgccgtgacgccggaggatctggagactctctgcgaccttgccaccgactactcccgctatgcggcggaggagaccctgcgggaggggtatctctccgtgcggggcggcttccgggtggggctgtgcggcacggcggtgatgaaggacggggagagcaccgccctgcgggacctgtcctccgccgctgtccgcatcgcccgggagcagagggggatcggggaggcggtggcgccccggctgtttcgggacgggcggtatcagaacaccctgctgctgtcgccccccggcggcggcaagaccacgctgctgcgggatctggtgcggtgcctctcctccggcggcaccggcaggccgggtctgcgggtctcccttatcgatgagcggggggaggtggcagtgatggtccgggggaggccccagatggacgtggggccccggacggacgtgctggacgcctgccccaaggccctgggcatccccatggccctgcgggccatgaacccccaggtcatcgccgtggacgagatcacggcggaggcggacctccgggccgccatgcaggccgccgggtgcggcgtggggctgctggccaccatccacgccgccgatgccgcagagctgacccagcggccgctgtaccggcagctgctggcggagaaggtgttccggctggcggtgcgcatccgccgggatgaggccggaaggacatacgaagtggaggaactgccatggtgaagctggtgggcgcggtgtgtatcctgggggccgggacctgggcctggcggcggtcggcggcggagcgcaggcgggagttggacacgctggcggacctgaccgccctgctggaccgcatgggggaggagatccggctccgccggaccagcctgccccggctgctggggtccctgggccgggaccggacgggacctgtccgggacttttgtacatcggtggcggcgtcgctggcgcggggcgcgcccctggggcagagctggcggtccgccgcggaggcgctgcccctcggtccagagagccggaccgccctgaccgccctgggagattccctccagggggatgaggagagcgtatgtaaagcattaacccttgccggaaagatcctggaaaaaaacctggcggcggcccgggaccacaggcaggagacggagaagcggtccgcggcgctgtggctttccagcgcggcgctgctggtgattttactgatttgaggatagacgcatggaagtggatttgattttcaagatcgccgccatcggcatcctggtggcggtgctgaaccagctgctgatccgctcgggccgggaggagcaggggctgatggtggtgctggcagggctggtgtgcgtgctgatgctgatggtccgagagatcagcgacctgttcgacctcatcaagtccctgttcgatttctgacatggagcaggtcatccaggtgacggggctgtgcgtggtgggggcgctgctggccctggtggtgaagcggggcagtccggagacggcgctgctgctggcggtgggggccgccgtggtggtggccctggccctggcgggcgtggtgaaggagctgctggccttcctgggggagctggggtcggccagcggcgtgtccgcggacctgtttgtgcccctgtacaagaccatcggcatcgccctggtggtgcaggtgggaggcaacctctgccgggacgcgggggagagcgccctggcctccgtggtggagacggcggggaccctctgcgccctgctggcggccctgccgctgctgcgggcggtgctggacatgctgttggagctgatgggatgaaatggtggatctgtttgacggcgctggtgctggcgctgaccacctccgccgcggcggcggacctgccggcggagctggagcgggccgccccggaggcggcggaggatctcacgggcggggacctctccggcgggacaggctttgcccagggggtggggaacattttagaccggctggcggaccaggtgggggacgtggtccgggagcgcacccggggcgcggcggcggtgctgctggtggtggtgctgtgcggcgtggtggagggcttcgcccaggggaccgggggaagggggcggcgttcctgcccatggcgggggcgctgtccatcaccctggcctccgccgggagcctggactccctgatggggctgggcagccggaccatcggggagctggcggacttctcccaggcgctgctgcccaccctggcggcggccacggcggccagcggggccgtcaccaccgccacggtgcagcaggtgtccacggtgttcttcgtggatctgctgctgcggctgatccggcagctgctgctgccgctggtgtacctgtacatcggattgctgacggcggcggcctgcctgccggaaaaccggctgggggccattgccgaggcgctgaaaaagctggtgacctggatcctcaccacggcgctgctggtgttcaccatctacctctccatcgtgcggatcatctccggctccgccgacagcgccacggtgaaggtggcaaaggccgccatctccggcgtggtgccggtggtgggaggcatcatcgccgacgcgtcggagacggtgctggccggggccgggatgctgaagaacaccatcggcgtcttcgggatgctggccatcctggcggcctgcgcctatcctttcctgcagctgggggtccagtacctgctgtacaagctgacggcgtatctggcctccgtggtgggggcgccggggctgtgcaagctcatcgacgggctgggaggcgccttcggcctgattctgggcatgaccggcggctgcgcgctgctgctgctcatctccgtgctggcctccgtgggggcggtgatgccatgatggaggcggtgcgggcgtggctgacctccgtggtactggtgtcggtgctgctgtcggcggcccagagcctgatcccgccgggcaccgtgcggaaggcggcgggcttcaccggcgggctcatcctgctgctggtgctgctgcggccggtgctgggggcagacctggagcatctggagctggatttcgaccactaccaggcggcggtggaggaacggcaggaggagctggccgacacacagaccgaggccatggcttctatcatagcggagcagacagaagcatatatattggacaaagcgggcgagctggggctggaggtgaccgtccgggtggagacgcggacggagggaaacggcatcccggtgccctggtccgcggagctgacgggcagctggtcgcaggcgctggcgtcggcgctggagacggaactgggcatcccggcggagaggcaggtttggcatgagcgggaagcagaaaactgaaggagtgcgaaggatatgggacaagtacaaattcgtggcgctggtggcgctggcgggagccgtgctgctgctgtggcccggcggggacgggaagacggcggagcgcgcctcgccccaggcggccgccctggtggaggcggagctccagcaggagatggaggacattctgggccgcatccagggcgtgggggaggtgcaggtgctgctgaccgtggaatcggacggcgagcggcagctggcacaggactcggagctctcttacagcggctccaccgcggcgccggaggactactcccgttcctcccagaccgtgctggtggatgacgggagcgccgaggcgccggtggtgacccggacggtgtatcccacctatcgggggccctggtggtgtgccagggcggggaccgggcggacgtgaagctggcggtgacggaggcggtggcggccctgaccggcctttccgcagaccgcatcaccgtggcaaaatcgcagtgatgatttggaggaggagacagcccatgagcgcgagatggaagcggaataccgtggtggccacgatggtgctgctggtgtgcgcagcagtggccctgaactggaagtacaccggcgagcaggcggcggacgccgtggaggagaccggcaccaagatcctgggggaagccacgctggtcagcggtcaggaggacggcggcgaggccgggacggatgaggaggcggtctacaccggcggggactacttcgcctccgcccggctgacccgccagcaggccagggacaacgccatctccctgctgcaggaggcggcggaccagtccggggccgacgcggcggtggccaacgaggcgtcggagggcatccaggtgctggcgggctacaccatgaaggaggcccagatcgaaaacctggtgaccgccaagggctataccgactgcgtggccttcatgggggaggacagcatcagcgtggtggtggacaccggcaccggcgagctgacggccgaggacgtggccaagatcaccgacatcgccatgacggagaccggatacccagccagcggcatcaagatcatggcctcaaattagctgttgtattttcccgggaaacatggtaaaataacaccctggaaccattcttctgggacgcggcgggcgacccccgtctctaccaaggatcaaacagtgaggagaggcttacgatgggcgagagcaaagagtatatgacgctgccggaggagaacgggagcatcaacatttccgaggaagtgattgccgccatcgccgtgggcgccgtccgggatgtggagggcgtgtccggcatggtgactgccatgggcggcagcgtcacggacctggtccacaacaagaagaacgcccagaagggcgccaagggtgtgaagatcgacatgaccggcgccgccctggtgctggacatctatctgacggtggagtacggccaccccatccccacggtggcggaaaatgcccaaaaggccgtcatcggcgcggtggaggccatgaccggctgctctgtggaggcggtcaacatccacgtgggcggcgtgacgctggcctgagtcccggatgggaatgagagagaaaaggacgtagttgaggttatggtacggaacaccgcgcgagagatcgccattcatctgtcctacgagctgagcttcaccgacaagccggtggaggagctgctggacgagcgcctgacaccggagtccttcgccgccctggcggaggaggacccgctgtatcaggagacgcccaacgccaagcaggcggactacatccgccgcctggtgcggggcgtggccgaccacgctccggagctggacgggtatatcgccaaatacgccaaggggtggaattttgcccggatccccctggtggcctccgccatcatgcgggtggccatgtatgagattttgtacatgccggacatcccccacggcgcctccatcaacgaggcggtggagatcgccaagaagtatgagacgccggagacggtgaagttcatcaacggcatcctgggcaccttcgtgcgccgggagacagcggaataagggcagtcctgcggagcgggacgggggcgtgacgccgccgtccggctcctcgttttctgcccgcagggaccaaggagcaaacgcgtatggaaccacatatctatggtgtcacagaggtgaatcagctggtgaagggcctgctggacagtgccccggctttacagggcgtcgccgtccggggagagttgtccaactacaagatctacccctccggccaccactatttcaccctgaaagatcaggagggggccctccggtgcgtcatgttccggggacaggcctcccgcctccggttccggccggagaacggcatgaaggccgtggcctccggccgcatcaccgtgttcccccgggacggggcctatcagctctactgcgactccctgatcccggagggggtgggggacctggcggtggccttccagcagttaaaagaaaagctgtggaaggagggcctctttgaccctgcccacaaaaagcccctgccgccctatccggagaaaatcgccatcgtcacctccggcgccggggcggcggtccacgacatgatccgcatcctccgccgccggtatcccatcgccagggtgatcctgctgccggtgcgggtccagggggccgaggccccgccggagatcgtgggggccatccggtacgcggacaggtggaagatcggggacgtcatcatcaccggccggggcggcgggtccatggaggacctgtgggccttcaacgacgagcgggtggcccgggccatctacgactgtgagacgcccatcatctccgccgtgggccacgagccggacgtgaccatcgccgactttgtggcggatgcgcgggcgtccaccccctccaacgcggcggagatcgccgtgccggaccaggtggagctgctgcggtggctccggggcgcaggggagcggatggcgagaagcgagacggcgcggctggagaccgcccggcagcggctcaccgccctggcggccaagcgggtgatgacggacggaatggcctacgtccaggacaagcggctggacctggaccacttacagcagcggctgggggacgtgaccggcgcggtgctggggcggcaccggcagaaattcgcggccctggcggcgtcgctggacgccatgagcccactggcggtgctgggccggggctacgccgtggcccgggatgagcaagggaagatcttgaaaagctggcgggagacggcgccgggcagccgggtgtccgtcacgttgggagagggcggcttcaccgccgtggtggacaagccctatacgaaggaggaacagccatgagcgcgaagaaacagacgttcgagcaggagatcgcccggctggaggagatcgtggcggcactggagaagggggatgcccccctggcggactctctggcgttgtttgaggaggggacgaagctgatcgccgcctgctcccaggagctggacgcggcggagcagaaggtggtcaagctgatgaagggccccgacggcgcgccggtggagctgcccttcggagaggaggagcagggatgagcgaacaggtgtttcagacccggtatgagacctaccgcacggcggtggagtcgtatctggagaccctctttgccgggagtccggactggcgggacctgtatgagtccatgcgatacagcctgctggcggggggcaagcgcatccggccggtgctgaccctggagtttgcccggctggcgggccttgcggactggaagacggccctgcccatggcctgcgccctggagctggtccacacctactccctgatccacgatgacctgccctgcatggacaacgacgacctgcgccggggcaagcccaccaaccacaaggtctacggcgagacgctggccgtgctggcgggggacgccctccagccggaggcctaccgcctgatcctgacggcgccggggctggacgagagccgccgggccgcctgcggccgcatcctggcggaggtctccggcgcggacggcatggtggcgggccaggtgctggacaccctccacgccccgaagaccgaggcggaggtgacggaggtccaccggctcaagaccggggccatgatcgccggggcctgccgcctgggcgtggccgcggcgggcggaagcggcgggctgatggccgccgccgaaacgtacgcccaggagctggggctggccttccagatccgggacgacatgctggacgtgtgcggcgacgcggcggagttcggcaagcccatcggctccgacaaagaggaggggaaggtcaccttcatggacctgctggggctggagggctgcggccgggcggtccgcgcccatacggaggcggccaaggccgcggtggcggactgggacacggacggcatcctggccgccctggcggactccctggcggagcggaacaagtgaagagcggggccgccggacggcggccccttttctgtccggcgccggggactgtccgcatcgggaggacagcccggccggtcacaaaaaatttacggacgcatatacggaatatgttgtatatttattagatttgtgatatactgtatggcgctaagcggcggcgcagtattctagtcagatcatccgtctccgaaggaggggctaaaaatcctctgaagggcacaccgatgaaacctctggtgcctgcttgatacgcccagtttcgggtgggtgctggggggaagcctggctttgcctgcgcttgcggactcagggcgctttccaatggcatggtgatgacgaccctgtttccgtggagacctgttcttgtgcgcggacgtactcccagtgtggtattccgggccgcgtacgaagcagctgatgaacctgcagcgcggtgcatcggccctgcggggccgtaacgctgtgtgcagacgtagcctgccttgcgtgaggcgggtggatgggggaacaacaggcggggccctctggccagagggcccgtttgatcgccccctgaaacccggtttgcaaaagaggctaaagggacggatcgactggggtggaaatcacctaggctgtcctgaccgggctgaaaagggattgcagtgcggactaagtggcgatcgggtggcatggctggcgacactgtgccgcggcaccgaagggggaaccgcctccatcggcaacgagaggtgtgccgcggggaaatccaacccgtacctaagccgtaagatttaccttttccgccgccgccgacttagccaactggaattcattcccaagtggagggactttttttgagcgataccccaaagcgaaagcgcggacgggagcgggagaggccgggcccctaccggtgggccgtgcaggtcttttttcttgccatcgtcctgtctgcggcattgagccttgcgtcggaaaccagtctcagcggcgcgggcgcggcggctgccgcgctggtgctggcggtgtttatcggcctgggcatcctgttcgacatcatcggcgtggcggtcacggcggcggaccccaggccctttcactccatggccgcccacaaggagcccggcgccaaggaggcgctggtcctgctgcggaacgccgggcgggtgtccagcgtctgcaacgacgtggtgggggacatctgcggcatcgtcagcgggaccaccactgccgtgatcgtggtgcggctccagacggcctttgccctgccggagagcgtgctgctgagcgtggcggtgacggccctggtgtccggcctcaccatcggcggcaaggccctgggcaagacagtggccctgaacaaaagcaccagcgtggtctactgggtgggaaggtttctgcacctgttccaccgctgagaggaggctgggtcatttgatcttagagaatatccataccccggcggacgtgaaggccctggaccgggaacagctggagcccctgtgccgggagctgcggcagttcctggtggagcatgtgtccaaaaccggcggccatctggcctccaacctgggagcggtggagctgacggtggccatccaccgggtcttcgacacatcgaaggaccggctggtgttcgacgtggggcaccagtgctacgtccacaaggccctcaccggccggcaggcgctgtttgacaccctgcggcagttcggcggcctctccggcttccccaagccccgagagagcgaacacgacgccttcatcgccggacatgcctccaactccgtctccgtggcccttgggatggcaagagcaagaactttacagcacttggattacagtgttctggcgctgatcggggacggcgccctgaccgggggactggcctatgagggcctcaacaacgccggtgcctccggcgagcccctgatcgtccttctcaacgacaacggcatgtccatcaaccccaacgtgggggcggtggacagccatctgagccagatccgctccaagcccgcctactaccatttcaagaagtggtaccggggcctgttcggacagcaccccatggagaacccgctgtaccggttcaaccacaaggtcaagacgtccctgaaaaaggccctgtggcccggcagcaccctgtttgaggacatgggcttcacctacctggggcccatcgacggccacgacctggaccggctggtccacgtgctggcctgggcccgggagctccagtgcccggtggtggtccacgtgaagaccgtgaagggcaggggctactccttcgcggagcagaacccggacaagttccacggcgtggggccattcgatccggagacgggccttgtgaagaagagcgggggagacgacttctctgccgtgttcggcaggacgctggccgcctgcgccgcggaggacgggcgcgtctgcgccatcaccgccgccatggcggacggcaccggcctggccccctttgccaaagagttcccggaccggttcttcgatgtggccatcgctgaggggcatggcgtcgccatggccgcgggcctggccaagcaggggatgctcccggtgtttgccgtgtactcctcgttcctccagcggggctacgacatgctgatccatgacgtggccctccagcggctccatgtggtgctgggggtggaccgggcgggtctggtgggggccgacggcgagactcaccacggctgcttcgacgcgctgttcctgtcggagatccccgggtttacggtgctgtgccccgccagctttgcggaactgcggcggatgctgcggcaggcattgtttgagatcgacgggcctgtggcggtccggtatccccggggcggcgagggcgattaccgggaggaccggtccggtgcgccggtggtccggctccgggagggggaggacgtcacgctcctcacctacggcgtgctggtgaatcaggccctggcggcggcggacctgctggaacggcagggcgtcaggaccgaggtgctgaagctgaatcagatctcccccctggagtatgagacgctggcgccctggctggcggggaagaagctgctggcagtggcggaggatgccttcggcgccgggtgcgtgggccagcggacggcggccatcctggcccagcacggccaggcgccggagaagctggtgctcatcaacctgggcaagaccttcctgccggagggggccgtgccccagctggagcatcaggcaggcatcgacgccgcgggcatcgcccgggcggtacaggaggcgcgtacatgagtgaaaaaaaacggctggacgtcctgctgacggagcggggccttcaggagagccgccagcgggcccaggcggtcatcatgagcggcgaggtctttgtgaacggccagcgggtggacaagcccggcaccgccgtggcggaggacgcccagatcgaggtccggggcggcacgctggcatacgtcagccggggcgggctgaagctggagaaggccatggccgccttccccatcgacctgaacggcgccgtctgcgccgacatcggcgcctccaccggcggcttcaccgactgtatgctgcaaaacggcgcggagaaggtctacgccgtggacgtgggctacggccagctggcctggaagctccgcagcgaccccagggtggtgtgcctggagcggaccaacgcccggtatctcacccacgagcaggtgccggacgagctggacttcgcctccgtggacgtgagcttcatctccctgaagctgatcctgccgcccctgaacggcctgctgaaggacggcggccacgccgcctgcctggtgaagccccagttcgaggccgggcgcgagaaggtggggaagaagggcgtggtccgggacccggcggtccacctggaggtgctggagcactttctggaccacgccggggacgcgggcttcacagtgctgggactgacctattcccccatccggggcccggaggggaacatcgagtacctgggatatctggaaaagggtccccggcaggagcgtacatttgatttgaaggccctggtggacgagtctcaccagaccctgaaggagcacggagagggaggcaacccatgaaaaagatcatcctctgccccaaccccaaccgggaccggggcatggagaccacccgcagggcagacgccattctgcggcagatgggcttccagacggtggtgtgtccccccttcaaggaccagaaggacggggcctatggggactacaagacccggcccctgacggcggagctgaaaagcgccgacctgctgattaccttcggcggggacggcaccatcctgcatctcgccaagctggtggccctgaacaagattccggtgctgggcatcaacatggggggcctgggcttcatcgcggagctggaggccggggagctggaggccctgcggaagctgaaggactgggacttccagacggaacagcggatgatgctggacgtgaccgtccagcgggagggccgccagatctacacgaatctgggcctgaacgacgcggtgatccgggagggtcccatctcccatgtgatccatctgaagatctcctccgacgggcggcacctggcggatatcgccggagacggcgtcatcgtggccacgcccaccgggtccacggcctactccctgtccgccggggggccggtggtggagccggtggcccagaccatggtggtctgtcccatctgcacccacaacatgcgcttttcgtcctatgtcctctcgccggagcacacgctgaccatcgagctggagcgcaacggccgcaagccggtgtatctgttcgtggacgagagccgggccttctccctgaaggccgacgacaagatccaggtccgccggtccaagcacaccgtgcggctggtgcggctgtcggagcggagcttctgtgagatctttgcacaaaaaatgctgccaggaggatttgaagatgaaaaatgaccggcagagcatgatcctggagatcatcagccaggagaatatcgagacccaggagcagctgctcgtccgtctccaggagcgggggatcaccagcacccaggccaccatctcccgggacatcaagcagatgcacctcatcaaggagccggtgggccatggagtgtacaagtacgccgtgtccggcaaccggacccggctgaacttcgcggagaagctgcggaccatcttccgggagagcatcaccagcatcgacagcgcacagaacatcgtggtcatcaagaccatgccgggcctggccagcgccgcctgcgccgcgctggacgacatgggcgtcgcctacatggtggggtccctggcgggagacgacacggcctttctggtgatgcgggacacggagtccgcggccagcttctgcgaggagatcaaggagatgctgtgaggcatccccggcgggagccggttcctcccgtccaacgggatgcgccctacaaaatatggaacagattcgatattaaggagatcactggatgttcaaagtgctgaaaaccgagggccgcgcccggcgcggcgaattctcctgcgcccacggcggcgtggtccagacgccggtgttcatgaacgtaggcacacagggggccatcaagggcggcgtctccgcccatgatctgaaggaggtgggctgccagatcgagctcagcaacacctaccacctgcacctgcggccgggcgaccatatcgtccggcagatgggggggctccacaagttcatggactgggacggccccatcctgacggactccggcgggttccaggtgttctccctggcctctttgcggaagatccgggaggagggggtcaccttcgcctcccacatcgacgggcacaggatcttcatggggccggaggagtccatgcagatccagtccaacctgggcagcgacatcgccatggcctttgacgagtgcgtggagaaccccgcgacctacgaatacgccaaggccagctgtgagcgcaccgcccgctggctggagcggtgcaaggccgagcacgaccgcctcaacgccctgccggacacggtgaacccggggcagatgctcttcggcatcaaccagggcgccacgtttgcggacctgcgggtgtggcacatggaccagatcgccaagatcgactgcgacggctacgccatcggggggctcgcggtgggggagcccgcggaggtgatgtacgagatcatcgacgcggtggagccccacatgcccaaagacaagccccggtacctcatgggcgtgggcactcccagcaacatcatcgagggcgtggcccggggcgtggacttcttcgactgcgtgatgccctcccgcaacggccgccatggcaagctcttcacctgggagggcacggtgaacatcctcaacgagaagtacgccaccgacccccggcccatcagcgagagctgcggctgccccgcctgccgccacttctcccgggcgtacatccggcacctgttcaaggcggatgaggtgctggccctgcggctggcggtgctgcacaacctgtacttctacaatgagctggccgcccgcatccgccgggccctggacgaagggacgttcgcggattttcgggcccgttacagcggaaatttggaaaaacgcgcatgacccccttgcaaaagctggtatatctgctataatattgtcattctgactttggaacgaaaaggagttttgttgttatggaaggcgcttcctcctctatcatcatgctggttgttctcattgcggtgttctacttcatgctgatccgcccggagaacaagcggaagaaaaaggcccaggagatgcgggacagcctgaagaagggtgacaccatcaccaccatcggcggcatcgtgggcaagatcgtcatggtcaagccggacaccatcgtcatcgagaccagcgacgaccgggttcgtatggagctgaccaagtgggccgtctccaccaccggcgtccagtcctccggcgaggagaagtcctccaaggaggagaagaaagaggacgaggtcaagaagaccgaggagatccccgaggctcccgccgaggagaccgatgcatcctctgaagaggaaaagaaggactaacccatcataaaaccaccctcccttgtcataagctcggatagagcgatgacaggggaggaatttttatgggtaacgggcggaaacagacagccctgtggctggtgttcgtagagggcgcggcgctgtctctggggatctatctgctgctgacggtgctgctgtccgcgctggtggtgaaggcggtgctgccggaggaggggagctttcccgctgtggcggcgtcgtgctgtctggcgtccttcgccggggccatgctcagtgtccgccgctcctcctggggcagcctggccagcgccatggtgagcgccgcaggctttctgctggcggtggtggctgtggcgctgctgtgctggcagcagatcacctggctgggccgcgggggcgtgctgctgctgtgcggcgcaggcgggggacttctggcgggcctgttgggtggccggcggaggaagcggaagcgccgtccggtccgcaggggccgcaaggcctgaaaagccgcttgtgaatttcaccaaaaatacagatctgagccctgccgcggagactgcggccacaggcgggaggtctcccgcggcaggggagacggcggcggcaaatgtggggcgccgccgcttttatgtctacaagatattgtcgtttttcggggcgggggaggtgatctctcacgccgattttacaaagttaacataatattgtttacataatattttgccataactcacaaaaaacggaaaattcccgtaaattccttgcaaaatccggcgaattcaactatattagaacaagcaaggtcttacgtcaaccgctacataaatccgcctgcccccgcataggatgcggtgaggtgaggcggattgaacacgagaacattgacgaagcggcccacggtccagctgcccacgctgccccgcctgcttctgctggcgctgttcttcctggccggcgtccttttgggacaggtcctgtcgggccgggtgccggacaccacgggggacgagctgcggcggtatctggaggactacgtccgcctggggggcgagggagcgcccactgtccagacggctctgtcggccctggtgatctatttccgctatccgctgtttgcatttctgctggggttcgcctccatcggggtggtgctgctgccctgtgtgacggcggcttacggcttttttctgtccttttccgtgtgctgcttcacggcggccttcggcgtggacggcgtgctgctggccctggcggtgttcggcctgcggtgcatggtgaccctgccctgctatttcctgctggcggcggcctcctgggggacgtccgcgggactggcggccgtgtcctttgggagaggacggcggactgcccctgtggtctacggccgggcctgctgggtccggttcggcgcctgctgtctggcgctgctggcgggtgtgtgtgcggagctgtttttgtccccggtgctgctgcggctgatgctggagcgcatcctggggtagagagaaagagagagggaggagagcacccttggcaagagacgacattgcggactttgggacttatctggcggaggagcgtcacgcctcccagaacaccatctgctcctatctgcgggacgtgacccagttctccgcgtatttgcgggagcaccagagctgcacgctgcggcaggccggcggagagatgattcaggactacatgagctggatgcgggggcgggggaagtccgccgcctcggtgacccggttcctggcctccgtcaagtcgttttacaactttctgctctccgccggcgccgtaaaggccaaccccgccaagagcatcagcgcggaccgggcagagcggaagtatccggagatcctcaccagcaaagaggtggagctgtttctggagcagccccggtgcgtggacgccaagggataccgggaccatgccatgctggagctgctgtacgccaccggcatccgggtcagcgagctgatctccctggacctgaaggacctgaatctctccgcgggcttcatccggtgtgccagccggggcaaggagcggatcatccccctgtaccacacggccgtgaaggcgctgcaggactatgtgcgggatatccggccccagctgatcgccgacggcggcgagcaggccctgttcgtgaacatgaacggcgagcgcatgagccgccaggggttctggaagatcatcaagtactatcaggagaaggcggggatcgaaaaggacatcaccccccacaccctgcgccactcctttgccgtccacctgctggaaaacggcgcggacctgcggtccatccaggagatgctgggccatgcggacatctcctccacccagatctacacccatgtggtgaagcgccagctgaaggatgtgtatcagaaagcccatccccgggcgtaattccaaggggagcaccggcgcctcccgccgacgctccggcgggcagagcccgcctctgccgatcccctcgcctttgcacggcaaagacggcccccggccgactgcggccaggggcagaggcgtcccgtccaggcacatgccctggccgggacttttttctgcgcaaacgcacggcagaccacggaaatgcacagcggcgttctgcctgcctgtgaaaaaattttccgccgccgcaaacaaaaccggctgcctgggactcaaataggtgaagagaagagaaaggaggaccgccatggatcacgacgaattcgcccgccgggcggaggctctccgggcccggctgtaccggacggcgtacctgtacctgggcagcgaggccgacgccctggaggcggtggacgagggcgtataccaggccctgcgggctttgcggcagctgcgtcagccggacttttttgagacctggctcacccggatcgtgctgaacgcgtgccaccgggagctgcggcgccggcggcgcctggccggggaggaggctctgccggagagcgccggtccggatgcctatgacgccctgcccctgaaggaggccgtccgccgcctgccggaggaattgcgggcggtggtgatcctgcggtacttcgcaggatacacccaggcggagaccgcccgggcattgaacattccccagggcaccgcggccacccgccagcggcgggcattgcagctgctgcgcctggaactgggagaggagggagacgcatgacccgaaacgaggaatatcaggccctgctccaggagctggagaccacaccggcggccctggacggcgctgtggagcgggcgctgcgccgccggaaacgggaccgccgcctgcggctcttcggcgtcccggcggggagcctggcggcctgcttcgccgcctttgtgctgctggtgaacctgttcccgcccttcgcgcgggcctgcggctcagtgccggtgctgcgggagctggcccaggcggtggcctggtcgcccagcctctccgccgcggtggagaacgactacgtccagcccatcggccagtcccagacggtgaacggcgtcaccgccacggtggagtatgtgatcgtggaccgcaaacagctgaacatcttctacaccctggactatgccccggacctggggcccatgtgggcggactgccggatcacccccggcgacggcagcgcgggagacgccggcggccggacggagaagccgggggagctggtggagatcaagcgggactttgtggaccgggacgtgcccggaatcctggatctgaccctgtcggtctacccggcagagcaggacgggggcgggccgcctgcggagaacaccggcgacggctactttgaccagccggtcgatgaccagccggcgtatctggcggagatgacgttccacctggaattcgacccctatttcaccgcccaggggacgctactggagctgaaccggacctttgccctggacggccagaccttcacgctgcaagaggcggaaatctaccccacccatctgcggctgaccctgacggcggacccggacaacaccgcctggctggcgggcctggacctgtacctggagaacgagcacggcgagcggtttgaaaagagcctgggcggcatcaccgcatccggggacccggagggggagggcatgggcaccttctggctggacagccccttcttcagccagggggagcacctgaccctccacatcaccggcgtccggtggaaggacaaggacgcgccgccggtgaagctgaatctggcggagggcaccgccgaaaacctgccggagggcacctggttccagggcgcagagcgcctgccggagggatggatcgtgtacctggtgtccccgctgatggagaaccggaccatggggagcgtgttctccagaggggcctgggacgaggacgggaactattatgagatctggcagttcggctcctcctacggctactgggacgagacggcgcaggagcgcgtaggggaggaccggtggtataccgaggacttccccctggcgggactggcgggcgacacggcctatctggacccctgctacaaccggatggccgccgttgatgcggcggttcccatccaataggcgagggggagtcaaatcccccgccttccatgcgaacgagagagcgcccgccgcaaggcgggtgcttttttgcccgccgaacggcggccggggtgatcctgccggggagaagcccgcgcgttttccctgttgcgcttccctggaaaatttgttatactgttacagtatgtatactggagggaaagcgccatgcggatcctgggcatcgaccccggctacgccaccatcggcttcggcctcatcacggcggagcgggcacaagtgaacatgcttacctacggcgccatcaccaccccggcggggctgccgctctcccggcggctgtaccagatcggcaccgatatggaggacctgatcggccagctgaagccggatgtcatctccatcgaggagctgttcttcaacacgaacctgaccaccggcatcgccgtggcccacgcccgcggcgtgctgctgtacacggcggaaaagtgcgggatcccgctccacgagtacaccccctcccaggtgaagatggcggtggtgggctacggcaaggcggaaaagcgccaggtgatggacatgacccgccgcctgctgcacctgaaagccgtcccccggcccgacgacgccgcggacgccctggccctggccctgtgccatgcccggagtgccacgtcccgcctgcccctgcaggacagcagggtcaaggagaccatctgaacagtcaggaaccggaccgctccgccggacgccggaattccgaactcccaaggaagtgtgattatccatgttttactatctggacggcaccgtggcagagattctgccctatctggcggtcatcgactgcggcggcgtgggctacgcctgcaagaccaccaacaccactctggcccagctgaaaaagggccagcgggggaagctctacacctatctggacgtgggggagaacgccttcggcctgtacggcttcgccacggccaacgagctgaacagcttcaagctgctgatcggcgtcagcggcgtggggcccaaggcggcgctggccatcctctccgccgccacgccggagtccctggccatggccatcgtcaccggggacgagaagagcctgacggcggcgccgggcgtgggcaagaagatcgcccagcggatcatcctggagctgaaggacaagatggcccgggagagcgccgccacggggctggacttctccggcggagccgctgtgagcgtcccggcctttacaaataaggccacagaggcggcccaggccctggcggtgctgggctacaccagcgctgaggtggcccaagcgctgaagggcgtggacgtggaaactctgtctctggaggagatcatccgccagtgcctgaaaaagatggtgaagtgagtatgaagatcctgtccgtgattctgctcctggccgcgctggccatggcctttcttgccatgatattcggaacccgctttgcggccctgctcaataagggccagcagcgccacggcctgccggaaaaagagcggcggcagcgcaaccgcagcggcgcggtgttcgccctgtgcctgtgcgcggtgttcggcctggcctggctggcggtgcatctgttccaggcgggctgaccgccccggccggaattttggagcacattcagagcacatgaggaagtgaacccatgagcatcgactttggaaacgacatctatgaagagcccatcgtggccaagaccttcctgcaggaggacgcccaggaggggtccctccggcccaagaccctgcgggagtatatcggccaggagaaggcgaaggacaacctggccgtgttcatccaggccgcccagaagcggggagaggccctggaccacgtgctgctccacggcccgcccggcctgggcaagaccacgctggccgggatcatcgcccaggagatgggggcgggcatccgcatcacctcgggcccggccatcgagaagcccggggatctggcggcgctgctgacgaacctcaacgagggggacatcctctttgtggacgagatccaccggctgaaccggtccgtggaggagatcctgtacccggccatggaggactacgccctggacatcatcgtgggcaagggccccagcgccaactccatccggctggacctgcccaggttcaccctgatcggcgccaccacccgggcggggcagctgtccgcgcccctgcgggaccggttcggcgtgacgctgcggctggagctgtacacgccggaggagctctctcagatcatcacccggtccgccgccattttgaacgtggacatcgtgccggagggcgcctatgagatcgcccgccgcagccggggcacgccccggatcgccaaccggatgctgcgccgggtccgggacttcgcccaggtgaaggccgacggcgtcatcaccaaggatgtggcggaccaggccctgtgcgcgctggagatcgaccacctggggctggaccccatcgaccggcggatgctgggggccgtcatcgagaactacggcggcggtcccgtgggcctggagaccctggccgccaccatcggcgaggaggccgtgactctggaggacgtgtacgagccatacctgatgcagctgggcttcctgacccggacgccccggggccggtgcgtgacggcgaaggcataccagcacctgcataagcccatccctggcggcatgacggcggatccgccggacatggaccagctgacgctgtgaggaggcggttttcatgaagcggaccctggcggagcgcgtcgcatttctgatgctgtcggcggcgctggccgtcggagcctgggccgtcacaggccgggctgcctgctccgtgacggcgccctatcagtttcccgtccagcccggcacgccggagtgggtggagctgtccgccaacgcccgtcgtgccgcctgccgcctgccggcggggctggcagagcagatgacctccgaggccctgctggagacggcgctggactatccgttcaacgcctccatgtatgtgtccagcgacctggaggggatgttcggaaagcgggcggccctggcgggcaacgacgccctggcggagctggtgacccggccggacgcggaggaagtgatcgcccgcgcgctggcggcgcctgcggaggcaggggaggaccccctgcggggcgtgtatctggagaccttctgcgcctggctgccggagctgtccaggatggcgggcgtctgaggcgtcacaggggcaggccccggccggtgcgcaggcccagcagaaaggcatggatggcggtgaattcccgggccttttcgtaatccgccgccatctcagaggtgagctctccctccagaagggagaggggcatctcgtagtcatccggtggggcagcgtccagctgggggcggatgtagtgggcgtacagccatttcatgaagtcggacattgcgaatgctcctttcaaaatacaatggatgcgttgtgcttagctgcagtataatacaacggatacatcgtgtcaagaggtgacgatatgacattgcaagagcgaatgcgggaactccgcaaagagcggaaggagacccagagacaggtggccgacgccatcggtgtgacggatcggcagtaccagcggtttgagaccggggtcaatctgcctggatttgaaaatctcgtgggcattgcggaccacttcggcgtatcgctggattatctggccggccggtcggaccggagggaaatgtagaggcgggtttcccgccgttcagaggaacctgctcctgcagggggcgtacagcctttttacaaagccggacattgcgaatgctcctttctgcaaacaacttttaagctgtttgcagaaaggatatatcacgacttttaggttgtgccaaggagatcatatatggagttttatgagcgaatgcgggaactccgcaaagagcacggcgagacccaagcgcaggtggccgcagccgccggaatgacagaccggcagtatcagcggtttgaaacaggcaaacaaaagccggggtttgacagtctgcttgccctggcggaccacttcggcgtgtcgctggattatctggccgggcggtcggaccggagggagatgtagaggtgggtttcccgccgttcagaggaacccgctcctgcaggggcgtgcggcccgtttttggagtcagacattgcgaatactcctttctcacgcttcataaagcgtgagaaaaatataacacgctctgcgaagcgtgttaagggggatttatggaactaaacgagcgattgcgggaactccgcaaggaacagggcgaaacccaaaagcaggtggccgccgccatcgggattggggagcggccctaccaatacttggagtccggcgagcaccggcccagcctggacacgttgatcgccctggcggaccacttcggcgtgtcgctggattatctggccggccggtcggaccggcgggagttgtaaaaggccgccgtccggcggcctcgggaatctttgctcccgcaaggggcttgttcagcgggatgcaccccccattttcttttcggtcttgcccgaaaagaaaacgggccgtgcacggtccaaaagaaaagaacgcttttggccgcaactctgcacgggcgtgcaaagttgctgtacgggggttggcgtgagatggtgcctgcgtgtttgcgaggactggccaacgggcgcggcggggtgcggtacaggcttgaacgctgattcccgcggcgtggatgcggaggtcaacggggtgcaaggacgcatttgaccagctcctctttctgcgcgttccgcttcgctacgcgctgccctggcggtcgtaggggccgatgcctttatcggcagctcccgcgcgggacagctagcggcagcgaaaagagaagcagctccatgcgatgaccaccccgacgacctccgcacgatccgccacgggacggcagttggagaaatcgcagaagagtatagcgtgcccgaaggccgggccaaatcggcgcttgcaccgatccgccgccccccgtcgcgcggagggccactgcaccggagcgcgccaacgcttttctctttggaccgtgcacggcccgtttctcttttggcacgacaaaagagaaacggggggtgcatccgcccagccatcaacatagctgaatccccgtcccatggggacggtcacatcataagaaacaaacgaggtaatatcaatgggcaaactatttggaaccgacggcatccgcggcgtggtgggggagaacctcactgccgacatggccttccgcgtggggcaggccgtgggcactgttctgatggaggacaagggcagccgccccaccgtggtgatcggcaaggacacccgcatctcctccgacatgctggagtccgccctgatggcggggctctgctccgtgggcagcgacgtaaagccggtgggcaccattcccaccccggcggtggcctatctcaccgtgcaggaaaaggcggacgcgggcatcgtgatctccgccagtcacaacccctatgagcacaacggcatcaaggtcttcagcggacagggctacaagctctccgacagcgtggaggcccggatcgaggagaagatcctctcccaggagcccatgaagctccgaacccggggggagatcggccgccgccaccacggtatgcgccagctgaagcgggactatatcgacttcgtggcctccaccatcgagtccgatctggcggggctgaaaatcctggcggactgcgccaacggcgctgccagcgccaccgcgccggagctgttcggccgcttcaaggcccggacggacttcatccaccgggacccggacggggtgaacatcaacagccactgcggctccacccacctggaggacctggccgccgccgtggtgcggggcggctatgacatcggcgtggcctttgacggggacgcggaccgctgcctgctggtggacgagaccggcggcgtcatcgacggcgacaaggtcctggcggtgtgcgccctggacatgaagcgccggggaaagctcaacggcaacgccctggtggccacggtgatgagcaacctgggcctccacgagttctgccggaacaacggcatcgacctgctctgcacggatgtgggcgaccggaacgtgctggagaagatgctggagcgggactaccgcatcggcggggagcagtccggccacaccatcttcaccgatgtggagaccaccggcgatggtgaagtgacggccctccagttcctgcaggtgctggcccggtccggggagaaagcaagttcccttgtcagctgctgcgccgtctacccccaggttctggtgaacgtggaggtgccccacagcggcggcgtgaaggaggccattatggcgtcccccgcgctggcggaggccgtgaagcgggaggaggaggccctcgccggcgctggccgggtgctggtgcgcccctccggcacggaggccctgatccgggtgatggtggaggccaaaaccacgcagatcgcccaggcggtggcggaccggctggcagatttcatcaaatcgcaaaaaaaataaaaatctgtttctcggatttttttacaaattgcttgacatttcactggatagacaggtataatacgatatgtacaaatttagcgagaagacaccccagcccctggaccagtgcagcgatgaaacgctgtgccaactggttgccggcggcagccgcgaagcggaggaagctcttgtgacgcggtacaaccggctggtccggacctgcgcccgccccttctttctggtgggcggcgacagcgaggatctgacccaggagggcatggtgggcctcctcaaagccgttcgggagtatgacgcctccaaggaggcatccttccggaccttcgcagaaatctgcattcgtaaccggctgtattccgtcctccgcgccgcggcgcgggataagcacatggctctcaatcagtcggtccccttggatacacccttctttgacgccaattcctacacctctggtaccagcgatctgactcagcgcgatcccgaagcgtatctcatcgacagggaacataccgctgccctcttatccggtgtccggaaacagttgtccgagtttgaagcaaagattttggggtactatttagacggtctttcatgcagggaaattgccgagacggtaggcaagcccccaaagtccgtggacaacgccgtgcagcgcattcggcgcaaggtggcacggcagcttctttccggcgatctcagcggaagctgaacgcaatatatttttcttttcaaagagagggtaacatcatgtacgaagacaagaccttagtttgcaaggagtgcggccaggagttcgtgttcaccgccggcgagcaggagttctatgccgagcgcggcttccagaacgagccccagcggtgcaaggcctgccgtgacgcccgcaagaacgcggcccgcggtccccgggagtatttcaccgctgtctgcgccgcctgcggcggcgaagcccgcgtgcccttcgagccgaagtctgaccgtcccgtgtactgcagcgagtgcttcgccaagatgcgggaccagcagagataaacgaatcaatccgttttggtctcttgcagaggcggcgcccggtgggcgccgcttcttcttttgccgtgggagccggccgccgcgccccgcgccggggaaacgggaggcattccggaaaaatgtgccggtgcggacgccgaatctccacatttccaggcttttcaaagattttctcttgaaaaacatcgaaaactagagtataatacccctgctgaatttcagattagaattggaggaacctctgatgatcgagatcaagaaggacaccatcatcggtgacattctggacgtggcgcctcagaccgcgcccatcttcctgtccatcggcatgcactgcctgggctgcccctcttcccggggcgagactgtggaggaggcctgcatggtccacggcgtggactgcgacaagctgctggccctggtgaacgaggaagccaacaagaaagcggaatgaccggaacgggacgcatacgggagaccgtatgcgtcctcctccgacagccggaacaggagggcgccatgggaaaacatctggaactgacgccgcgcctgcggcagatcgccgcctgggtccgccagggtgcgcacctcgctgatgttggcacggatcacgcctatctgcccgtgtggctgacgctgcagggccgcgtggcctctgccattgccagcgatctgcggcgcggccccctggaccgggcgcaggagaccggccggcgctacggtgtgggggaccggatcaccttccgcctgggcaacggtctggccgccgtggcgccggaggagtgcgacaccatcgtcatcgccggcatgggggcgagaacatcgcccagattctggccggggcaccctggaccgccgacggccgccacaccctgctgctccagccccagagccgggcggaggcgctgcgccgcttcctggcggagcacggctacgccatagcgcgggaggcgctggtgcgggaccggggctttctctatcccgtgatcgaggccggggcaggggagatgcatctcacgctgggccggcagtgggccggggcggacctgctctacgacccctgggggaccgctacatcatcgagaagatcatccagctccaggcggcggcggccgggtccaaccgggcgtcggcgccagaggcccgggaacggggcgattacgccagggccgtcatcacggagcttctgcaaatgagggaggagtggcgccatgccaactgtccgggaaattgaacaggccctgttccgactggccccgaaggagggcgccatggactgggacaacgtgggccagctgctgggggacccggaggcggaggtccggcgggtcctggtggccctggacatcacggaggccgtggcggacgaggccatcgcggaaaactgccagctgattgtcagccaccatccggtgatgaactgcaaatggctgccggtgcagaccgtccggcaggacacgccccaggggcacctgctgctgaaaatcctgaggagcggcctgtccgccatctgtatgcacacgaacctggatgtggcccccggcggcgtcaacgacgcgctggccgccgcgctggggctggaggaccctgggccgctggggacccggaggggctgtgccggatgggaacactggcaagtcctatgcctttacaggaatttgcaaagcacgtctgccgggcgctccaggccaacggcgtccgctacgccggggacagcggcccggtgcggaaggtcgcggtgggcggcggcgcctgcggcgactatgaggatgcggccatcgccgcagggtgcgacgtgttcgtgacctcggacctcagctaccaccagtttttagacgcggcagggaagggcatccgcctgatcgacgcgggccacttccccacagagaatccggtgtgcaccgtgctggcagagtacctgcgcggccggttcccgggcctcaccgtcaccaaatccgcctcccaccgggaggtcatccagtattacgtagaaggagagtaatgtaccatgtccggacattccaaatggcataatatccaaaagaccaagggcgcggccgacgccaagcgctccgccgccttcaccaagatcgccaaggagatcatcgtggccgtgaaagagggcggcggctccggcgaccccaacaacaactcccgcctggccacggtcatcgccaaggccaaggccgtcaacatgcccaacgacaacatcaagcgcaccatcgaccgggccctgggctccggcagcaccgacaactacgaggccgtcacctacgagggctacggccccggcggcgtggccgtcattgtggaggccctgaccgacaaccgccagcgcaccgcgccggaggtccgccacgcgttcgacaagtgcaacggcaacctgggcgcccagggctgcgtcagctggtcctttgacaagaagggcgtcatcgtcattgacaacgaggagggcgagctggacgaggacaccgtcatgatggacgctctggaggccggtgccgccgactttgaggccgacggtcccgccctggagatcacctgcgaccccgacgctttcaacgatgtggtgaaggccctggagggaagggctacgccttcgccagcgcggagatcgagatggtgccccagaactacatcaccctcaccggcgagggagacgtgaagaacatggagaagctcatcgacatgctggaggacaacgacgacgtgcagaacgtctggcacaactgggataacgactgagcatcgctggatagagagaggacggggagacccgtcctcttttcatctctgcagaaatgaaacaaaacttttcttttgtgcaaaaacgccggagaggcgggcctaaccggtcccccttaccattaccataacaatgaccataaccatcaccataaccctaactctagctattaccataacgggagaattttacaaaatcctcccggagattgcatagaaccgtgcatcagatggggaggggacgccttttcttgagaggagtggtttttcgttggcagaggaacacaagaagagttttatgctgtatttcgataattttccctgtgtggcggccctggacgcggagcagcgggggaactgctgcttctgttgtaccgctatgccatggcggcggacaaggctcccacggatccggaggaggttttgcggcagcacccgggcttgagggaggagacccgcatggcctaccggtttctggcggagaccattcggcgggatacagagaagtggaaggaaaagcagcggcgctaccaagaggcggcggcgcggcggcagggggatggggcgatctcccggcaggccctggaacaggccgcgcccaaggattacagcgacatccggaagtacctacgggacgtctctaccgctggtcggttgccaaaatcggacccatagggtagactgagggcgaggtgatacacgtgaacaaggagcggctgggcgatttcatcggcagcgagcggaaaaatctgggcctgacccagcgggatctggcggcgcggctgcatgtgacggacaaggccgtcagcaagtgggagcggggactgagctacccggatgtgacgctgctggagcccctggcggcagccctggacttgacggtggaggagctgatggcctgccggaggcaggcggcgaaaggagcggaggagaccatgcagagcttgttggatatctcccgtgacagcgtgcggcaggagcggcggcgctcctggcagcggctggcggcggtgctggtgctgctggccgtaactgcagccgtggtggcgtatacgcagatcgtggtgacggaggaggggtattacagcatcgttctgaaagagactgtgaatggcaggaactgtgtctatgtggaggaccgtggacacctgatccggctgaagtgcggggaggatgtggactttgatgccctcacgctgcgggacgagcggggagataccatttcctatcagatggactttcaatggaaccggctgacccgcactggtacggtgtctgcctgtgaggacaccggcgtcaccgttctgggaggtgtcatggatgtcacctatgagggggattccggcagcgtgccgcttctcttcggcgataccagcgtccagtatctccgggacgggtattacccggacccctacgcagagtccgaaaatctggtgtttttatgtgacgtccggttttggccctatcatccggaggagccggaccccaccggcatcaacacccgggcaatcctggaagtggaggactgcatcaacgccgaggcgctggacgtggatggggacggagcgctggaggtggccgtccgcacccgctggccggagaagccgtacaccgtctacgactatgtggatggagagattgtggagtcatggccggacaccctgccggaggagattttggaacagatgtgggccccgtgggaagggctatgagaggtgctgcctatggaatctcctgcgccccccctctgagagcggcgggtggggtctccttccacccggaggcggggagccagcatctggcctttcacagccgggagcgggtcctccgccgcatcgaccagtacaccgcgcggcagtaccggcatcaatcgggacaaaaagaggccctggctttcgccaggacctcttcttgtacgagcaagactgtaagccgggttctgtatcaaacagtcatctatctcgacgtaccgtcgccggtacgctccagccaccccgggagcggccgggccagccttgagggtcggaccccctgctcccataccggtgttgctccggatagagtttacagcatcggacagtctccagccgatgggtgagctcttacctcgcctttccacccttaccgacagagctactctctgtcggtaagggtggcttgccgctccccgcgggagcggccgctgcggcgggctgattgcaattaggaagagggacccttcgtccctcttcacacaacacccctgcgccgttccgcgcggaagcgattgcgctgttcggggaagtttccctcgccccgctccgcgggcatcgcgttcagccgtcgctggttccctgaccgatacagagtaactctgtcggcggtatatctctgttgcacttttcctgaagtcgccttcggcgggcgttacccgttatccttgccctgtggagcccggactttcctcacgaccggcctttcggcctggccgcgcgactgtctgtcttactcgcctgtctattttagcggaatccgacgggattgtcaacgcctggccgcaatgcggcctccacatcggcggaagtcgccagggccttccgctgaaaataccggatggcccgcagagcgcagttaggtcccggcttcatggccccgcagccctgggagaaaaagtctgggaaggggaggggcgtggttgtatttttttccgatctgcggtataatttccttgtctgtcaatctctgccgcccagcgcggcgttaggagcgtacccatgaagtttgaggaatatctggactctctgcggaacaagtccgtggccgtcatcggcatcggcgtcagcaaccggcccctgatccggctgctgctggagcggggcattcgcgtcaccgcctgcgacaaaaaatcccgggaggccctggggcccctggggacgagctggagcagcacggctgccgcctgcagctgggggaggactacctgaagggcctgacggaggacgtgatcttccggacccccggcctgcggcccgacgtgccggagctggcggcggcggtggcgcggggcagcctgctgacttccgagatggaggtcttttttgaggtctgcccctgtcccgagatcgccgtcaccgggtccgacggcaagaccacgaccaccacgatcatcgcaaagctcctggaggccgccgggcgcaccgtccacctggggggcaacatcggccgcccgctgctgtgcgacacgccggacatcgcgccaacggatctggcggtgctggagctcagctccttccagctgatgaccatggaccggagcccccgcatcgccgttatgaccaacctgtctcccaaccacctggatgtccacaagagctacggagagtatatcgctgccaaggaaaatatctttacacaccagacagtccgggatattgccgtctttaatgccgacaacgaggccacggtccgctgcgctgaaaaggccccgggccgggtgcggtggttctcccgccggaaggaggtggcggacggcgtgttcctccggggtacctctatcgtctgccgggggccgcagggcgagcgggtagtgctggacaccgccgacatcaagctccccggcgtccacaacatcgagaactacatggccgccgtcgccgccgtggacgggatggtcccagacgaggccatccgggccttcgcccgcaccttcggcggcgtggagcaccggatcgagctggtccgggagctggacggggtgcgctggtacaacgactccatcgcctccagccccagccgcaccatcgccgggctccggtccttcccggagaaggtcatcctcatcgccgggggcaaggacaagggcatctcctatgacgccatcggcccggagatcaacgagcatgtgaaagccctgatcctctgcggcgcaaccgccggggtgatccgggccgccgtggagaaggccgccaacttcaccggcctgcccatcacggaggtggacagctaccagtccgccgtggcgctggcccgtgagacggcgcggccgggggatgtggtgctgctgtccccggccagcacctcctttgaccggttcgccaacttcatggagcggggccgggtcttcaaggatctggtgaacgctctgaaataaggccaggccgcccccgcatacaatggcgggaagggggcgtgatggccatgatctggcgcggattttacttctaccgccggcggatggaccgccggcgggtgctgcgggccctggcgtttctgctgatggctctggcgctgacggtgctcttcatcgccgccacccagatgcggcctctgctggagagcatggccaccacccgggtgtccaacaccgttacccgcatcgtcagcgaggccgtgtatgaggccatcgagaagggcgagctgcagtacgacggcctggtgtcctttgagaaggacacggagggccacatcaccgctgtgcagagcaacatggcggccttcaaccacctgcaggcggagattctggacacggtcctgacccgcatcagccaggtgcccaccggggacctgtccatccccatcggcagcctgacgggttcgacgctgctggcgggacgggggccccgcatcaccgtgcggatggagtccgtggggtcgtcggaggcgaacttccgcaacgccttcacctccgccggcatcaaccagaccaagcatcagatcatcctgacggtggatgtctccgtcagcgttctgctgccggggttccgcaccgccaccaaggtgtccaattccttcatcgtggcggagacggtgatcgtaggcacggtgccggacacctacacttatttctccacagatccggatacgtacgaggaggatctgaaagactacattctgaacaacagctgagaagggagcacaccctatggactaccgcgaggaaatgaagcagctgcgggactttttgaaccagcagagctatctgtactatgttctggacgcgccggtgatcccggattacgagtacgaccggctgaaccggcgcctggaggagctggaggctgagcaccccgaggagatcaccccggactctcccacgcagcgggtgggagacaaaatcctggagggctttgagacctatgagcatccggtgccgctggagagcctgcaggacgtgttcaacgcagaggaggtctcggagttcctggatcggatgcgggaggccctgggggacggcgccgcctactccgtggagcccaaggtggacggcctgtccgtggccctggagtatcgggacggcgtgttcgtccggggcgccacccggggcgacggccgggtgggggaggacgtgacggagaacctcaagaccatccgcgccatccccatgcagctgccggagaagctgccccggctcatcgtccggggcgaggtctatatgtcccgggcggtgttcgcggagatcaatgcccgccgggagctggagggcaagcccctcatggccaatccccggaacgccgccgccgggtccctgcggcagctggaccccaagatctgcgcggagcggaagttggatatccaggtgttcaacctccagctggcggagggcaagaccttccagaaccactcggagaccctggactacatggcctcccagcacttcaaggtgatcccccacaagaccctctccgacccggcggagattcaggcggagatcgaccggatcaacgaggagcggatggactaccccttcgacatcgacggggcggtcatcaagagcgaccacctggcggaccgggagcggctgggctccaccgccaagttccccaagtgggcggtggccttcaagtacccgccggagaagaagttctccgtggtccaggacatcgtggtgcaggtgggccgcaccggcgtgctgacgcccaaggcggtgctgtccccggtgcggctggcgggcaccaccgtcaccaacgccaccctccacaaccaggacttcatcaccgagaaggacatccgcgtgggggacactgtgctggtgcagaaggcgggggagatcatcccggagattttgagcgtggacttcgacaaacgcccggagggcacggtgccctacacgctgccggacgcctgcccggtgtgcggcgccccagtggtccgggacgaggacggcgcggccctgcgctgcaccggcgcggagtgcccggcccagctgctgcggaacctcacccacttcgccagccgggacgccatggacatcgacggctgcggtccggcggtgatccagcagctgatcgactccgggctgatctccaacgccgcggacctgtacagcctccacgccgcggacgtggccaagctggaccggatgggggagaagtccgcggagaacctgatccgggccattgagaactccaaggccaacgacctgagccgcctgctgtacggcctgggcatccggcaggtgggggagaaggccgccaagaccctcgccgcccacttcggctccatggacgcgctgatggccgccacagaggaggcgctgacggagattcccgacgtgggcggcatcaccgcccggtgcatcgcggactacttccggggcgaccaggcgaaggacctgatccgccgcctgaaagaggcgggggtgaacatggagagcaccgcccagcccaccggggacctgctggcgggattgaccttcgtcctgaccggcgagctggagtccgcctcccgcaaggaggccggggagaagctggaggctttgggggccaaggtgtccgggtccgtgtccaaaaagaccggcgccgtggtggccggagaggccgcgggcagcaaactccggaaggcccaggagctgggggtgccggttctcagcgaggagcagtaccgggtgctggtggacgaggtccccggcgacaaggcggaaatcctggccctgctgggccgggacgaggcggcaaaagaagcggaataaacagggaagcgggggctcacgcccccgctctttcggcttgtgtgcaggctgcgctgcgatgcgtgcccggcgggcgtaccgtcagcaggggtcatcgatctggatcatgaattttgtgacgtattcctccgggctggagatcgcaaattcgttcaatccaagctcgtaggcaaagcccgtcagtgtcagatgctgccggcgggcatagtcgatcattttttggtacatggcgggcgccttgtcccaaggtcccttctgatagccgcaaagataccgccccgccggcctgacgaacgtatgcggaccggatgcgctgccggacgaataggtaaacagcccgtcgtatgtttcaaaggacccggcggtgactttgtccagggagaggaagctcccgattcccatgcgtatctgctcaatgccccattgacttttcaaatcggtaaaaagccgggataaatcgtctccggaaaaatcatacggcaaaacagaaattttgaccgcgccgcactcctcgaccctgatttcctcatccggcaggccctcgcaaagacgcacctgcgcttttttggtcttcagtatgttccgcgcgcgcttcagccttcgtatctccagatcgatttccgcctctttccgatctgcgatctgcaaaaacttttccggagcaggatgcttacagtagtccgcaatttccgcgatgctcatattcaactctttcagcatacggatatactcaaaaacaatgctctgtgatgcgtcgtaatagcggtaaccgttttcccccttttggcagggggaaaacaggccgatgtcgtcataataatgcagcgttctccgattgacaccgtgcagttccgcaaactgggcggtggtcatttttacagtgttttgcctcatcacaaaatagctccttttccggtattgacattacagctgctgtaaggactattatacggggtatccgagaccaataccagggggaatatcatggagatgcaaatcagagaatatcagaaacaggactttcagcccttaaaggaaatcatccgaagcacgtggcactatgatgagttcagcagtcccgaaacggcttccaggctggcggaggtttttctgcgcagctgcctgacaaattacaccttttcacaggtggccgtacttgacggaactgcggcagggatcattttggtaaagaacaacaaggatcacagatgcgccctctctgccagatttcagcaaatcctgtccattgtgaagctgtatgcgtccaaagagggaagggcagtctctcaaatcttccaaaacgtcaatgagatcgatgagcaattgctgcgcggctgcaaaaagacctatccggcggaattggctctgtttgctgtccgttcatcctgtcagggaaagggcatcggcaaaaagctgtttcattccgcgcttgcctatttgaaacagcagggattggatgaattctacctgtttacagataccagctgcaactacggcttttatgaacaccagggcatgtgccgccgcggccagagagagcatcttttccagataaacgggcagaccgtaagcatgaatttctttctttatgaccgcgcaacggtatttcatgacgctgcgggctgcaatttttgaaattgtattaactgcataaaaaataattgtttttttgtgcagttcatcaatattctggagcgagtcactccgaaacattatccagttcggccatagacaccggcggctctgcgtggtatctttgttaagcaccagccgggaaggctgggagtctgatacagaaaggatgtgtttcccatgcgactgcgttccgaagcggacgtgcaggagttcctggacgccgtcagccagtgcggcggcgacgtgtacctgaagagcccggagggagacatttttaatttgaaatcctccatgtcccggtatatcgccatcggccgcctcatcgaggagcagggcgataccctggagctctttgccgaccggaaggaagaccaggcccggctcatgcccctggtggaagacctgatgaagaacggggactgagtccccgcaaaaagcgcccgccccgatctcccggggcgggcgctttccattcagtgggtcacttgtcaaaggacgggttcacaaagtagagattcttctcgttcatcttgtccttggccagccgcagtccctcgccgaagcgctggaagtggacgatctcccgggcccggaggaacttgatgacgtcgttgacgtccggatcgtcggagaggcgcaggatgttgtcgtaggtgacacgggccttctgctcggcggccagatcctccgtcaggtcggcgatcaggtcgcccttcaccgccatgctggcggcgctgtaagggaagccggaggcggcggtggggtacacgccggcggtccggtccacaaaatacgtgtcaaagcccgcggtccggatctgctcctcggtgaggtccctggtcagctggtggacgatggcgccgatcatctccaaatggcccagctcctcagtgccgatgtcggtcagcaggcccttcagctccgcatagggcatggagtaccgctgactcaggtagcgcagggacgcgcccagctcaccgtcgggcccgccgtactgggagatgatgacggaggccagcttgggattggtgttcttgatcttcaccgggtactggagcttcttctcataaatgaacatcagtcattgcctccttcctcccagggccacgggtccttcagccaggcgaagccgtcctccggcgtcaggtccgtctgcagcagggggccgtacatcttctggtacttctcacggccctctttcgccagcttgatataggaccagtacagctgcagcgcctcctgatcctgggcgtgggtggtgagatacaggcccagctcgtcaatggcaaagtccagggccatcagctccaccagggcggtgttggccattttcgtcttggcctggatggccgccttgaaaggcaggtcaagccccgggaacagggtgccggtttgcagggcctccatccggctgtaccggacagggttctcctcctgcatggctacaaagggaaacaccatgggtgcacaggtgccgggcagagtgccctggttcggctggcaggagccggacggcggcatggaaggcacggacggcgtgggcggcgtattggtgttgggtttctccatctgcatggatgcctccttctggggtagggtgcgcatgggaaccatgcgcccatgccatcctatgcggagatggtccgggaggagcctgcccttgatttccgccgtccgagccgctataatcgggaatatgggataagcaggcgggaataggctttccccagggggtgccgcctgtgattattctgatccgaaagcgccatgtggcgtatgttgtgctgctgtgttgttttgtcgccgggctctccgccgtgctgtggcatgggaacgccgccttcacggcggcgttcgccccgggggaggagggcgcgtctcccgttgtggtggtggacgccggccacggcggggaggacggcggcgctgtggccgccgacggcacggtggagagcggcctgaacctcgccatcgcccggcgggtccgggacctgctgacctttgcgggggtgcccaccaccgtcacccgggagggggacgccgccatttacgaccccggcagcgccactctgcgggagaagaaggtctccgacctccacaaccgggtggctctggtgaatgagctgcccggcgcggtgctgttgagcatccaccagaacagcctgccgtcgtcgccctccacccggggggcccaggtgttctggaaccgccaggagggggcggaggaactggcgtcgtccattcaggagtccctgaacggcgccgtcaacgccggacatgagaagaaggccgcccaggtgccgtcctcggtgtacctgatgaaggagatcaccgcccccggcgtgctggtggagtgcggatttctctccaacgccgcggagacggaacagctgaaggacccggcctaccagacaaagctggcggcggccatcgcggcgggcgtgctgaattcagataagcgttgaaagagaaaagatcagacagtttgttcctttctctttccatgggaggttgcaatgaagccaaagactctgttctactgcacggagtgcggcaatgagacgcccaagtgggcggggaagtgcccggcctgcggggcgtggaataccatcgtggagcagccccaggccgcccgggcggcagggaagggggcctcccgcccggcaggaggggggccgtccgcagggcccggccggtgacggagctggaggcggatgcggaaatccggttctccactggcatgggagagctggaccgggtcctgggcggcggtgccgtcaagggctcgctggtgctggtgggcggcgcgccgggaatcggcaagtccacgctgatgcttcagatctgcgagagcctctgccgggagaataaggtcctgtatgtatccggcgaggagtcggagcaccagctgaagctccgggccaagcggctggacgtgcagagcgaacggctgttcgtgatctccgagaccagcctgggggacctgctggagtccgtggcggcggaggcgccggacgtgctgatcgtggactccatccagaccctgtacaatgacgcgctggagtccccggcgggcagtgtcagccaggtgaaggactgcaccatggccctgatgcagctggccaaagggcaggggatcacggtgttcgtcatcggccatgtgaacaaggaggggtccatcgccggccccaaggttctggagcacatggtggactgcgtgctgtactttgagggggaccagcacaccgcctaccgcatcctgcgggcggccaagaaccgcttcggcgccaccaatgagatcggcgtcttcgagatgcgggacagcggcctcgtggaggtggagaacccgtcagagatgctgctgtccggtcggccggaggacgcccccgggacctgcgtcacctgtgtgatggagggggcaaggccggtgctggcggagattcaggcgctggcggtgtcgtctccggcgggcaacccccgccgcaccagcaacggctttgactacaaccgcttcgccatgctgctggcggtgctggagaagcggggcggcctgaaggtctccgcctgcgacgcgtacctgaacatcatcggcggcttgagcctggacgagcccgccgcggatctggcggcggtgatcgccctggcctccagctatctggaccggccggtgccggcggatttggtggccatcggggaggtgggcctcaccggagagctgcggtccgtcagccagctgggccagcgggtcagcgaggtccggcggctgggctttacccagtgcctgattccgtcccgccggaccggggagctggccgcgcctgcggggcttcgtctgatcccggtgcggaatatcggtgaggcgatccgagccgcccttcgtccgtcggaatgaagtggacgcaggcgccgcccagggcggggaggcccgccgcggcggcgctgtccagcgtgcagacgccgtcctgctgatacacacattggctggtacagggaatcaaactcatacacatcatcccatctccatggatttgggactagctttgccgaaagcggcggtttttatgtccggtccggagatgcgccgcgcattccggcgtgtgccgccggcgctgcggctgcggtccggccgggaaattttcaaaagacctgtcagggaaggaggttttgcggggagacagaaaattgaacaaaataaaaattttgttcaatttgggggagagccaaaccgctccggggcccgtttcaggcccccggcacgacctacccccccagcagccgctccggcggctgcgcggagtatctgcccgcaagttgacaccgttatggctgattaccgcaccgaagcgccgcagattctgcgggactttctctcgtaccacgagaccatcaaagcccactccaagcggaccgtggacgaatactttctggacctgcggaatttcttccgctatctcaagcagacccgggacccgtccctgtgtgaccggtctctggatgagatcgacattatggacgtggatctggacttcgtggcctccgtgaccctgacggacatttacggctacatgacgtacctcagccgggaccgggtccagcaccagaacagccggaattccggctacggcctgaacgccgcgtcccgggcccggaagatcgccacgatccggtcgttttacaactacctcaccaataagatgcacttacttcgtgaaaatcctgtcaaagatatggattctccgaaattgaagaaaaccctgcccaaatacctgaccttggacgagagcatccagctcttggactccgtggacggcaaaaatcaggagcgggattactgtatcctgacgttgttcctcaactgcgggctgcggatcagcgaactggtgggtctgaacctctccgacatccaggaggatgccctgcgggttcttggcaagggcaacaaggtccggatcatctacctgaacgacgcctgccaggacgccatcgccaaatatctggcagtgcggcggcccatcaccggccgggacgcaaacgccctcttcctctcctcccagaacgagcggatcagccgctccacggtccacgccatggtgaaaaagcggctgggtcaggcgggcatcgacccggcggagtacagctcccacaagctgcggcacaccgccgccacgctgatgctgcagaacggcgtggacgtccgggccgtccaggaggtgctgggccacgaccatttgaacaccacggaaatctacacccacatcgacaacgaatccctgcggatagctgcaaaggcaaatcccttgtcacacgtgaaaaaatcaaggaaaaagcaaaaggaaaccggctgagaggcgctccctcccagccggttttccctgttcattttgcgcaaacgattgcctaaggccggatggtgcccagtacgtgcagaaaccggatgtcctggaacgtgtaggtggacaggggccggttgtcggcgtcgtagctgtgggcggcgatcagtaccgtctccagggtgatgggcgccgtcacccgcaccaccaccggcgtatgctggaactcctggccgttgaagctcagctgcaccaggtccccgggctgcaggtcctccagggcgcagggctgggccaccggccccacggagggcgcctgcctggtcatgaaattccagaaatagggcaccccggtccaggagggggacttctggttggcgtcgatgtagtaccagccgaaatccggggtgaagttcatcacaccgctgccggcgaacacacactgagacgcgaagttggtgcagtctcccccacgttctcgtagtcgtaaaaggccgggttccggccataggcccactggtgggcatacagcacggcggcactgcggtcgtagtctgcaaaaaagcgcatgggctcccctcctcttcccgccattgtatgcgaaagagggacgtttggtcagttgggagttcggaattcatgtgttctgctgcaggcggaacaattggaatgggtccggcaaagccggacccagaaattgctcattccgcatgattcctcattcctaattcgctccgatagcgctccgcctggtccagcagctctccggcgcttgccagcagggcctctgtcacgcggctgccgccggtgatccgggccagctccgccttccgctgctcccagtccagcagcaccacacgggtataggtgcggccgtctcgctcccccttctccacggagaagtgggtgtccgccatggcggccagctgcgggaggtgggtcacgcacagcacctgcttgcggcggctgacctgggccagcttctccgccaccttctgggccgcacggccggagacgccggtgtccacctcgtcgaacaccagcgtgccgatggactcctgctccgccagcacatttttcagagccagcatgatccgggccagctcaccgccggaggcgatccgggcgatgggcttcaagtcctccccggcgttggcagacatcagaaaccggacggcgtcacagccgtcggggcccggctccttctccccgaagtcgatggcgaaccggaccttgtgcatgtccaggtcccggagctcggactggatgcgctgctccagaacggcggcggcctctttccgggcggcggtcagctccgcccccgctgccaggacggccttccgggccttctccagctgctgttccagccgggccagggtgtcgtccgccgtctccatatcatccagctcccggcggcacttgtccaggtaggccagcatctcatccaccgtggcgccgtacttctttttcagccggtacagcaggtcggaccggctctccaccgcgtccagctccgccggggagaagtcgaacgcctcccgcttgtcccgaatgatctcggcaaggtcataggcttcacaccgcagctgttccaggcgctggtacagctcccccatgtctccggagagcgtgcggacaccggcgagggcctcttccgcgtcccggagggcggagacggcgccgcctccctcctccccgccgttcaggcagtagtccgcccccgacagggcggagaggtacttctccccgttccgcagcaggtcccgccgctctgtgaggctctcctcctcgccgggcaccagctgggcccgctccagctcgtcgatctgaaagcggaggctgtccatccgccgggccttctccgcctcgtccatctggagagcccgaatcttcgcctgtaagtcggccatggcttcataggtcgtctgataccgccccaggggtgcctccgtccggccaaagcggtccagatagctcaggtgctgctcctcgtccagcagctgctggccgtcgtgctggccgtggatgttcagcagctcttctccgatcctgcgcagctgggccacggtgacagggcggccgttgacccggcagaggttcttgccgtcccccgtcagctcccgctggagcagcaggtggccgtcctcgtccggggcagctccggtctccgccaacccggccagatcaccgggcacctgggaaaattcggcgctgacaaaggcccggtccgcgccggtgcggaccaggtcccgggaggtgcgcccgcccagtaccgcgcccatggcgtcgatgacgatggacttgccggcgccggtctcgccggtgagggcgttgaagccggggcggaactggatgtccgcctcctggatgaccgcgatattctcaatgtgcagaagctccagcatgggactcctcctctgaaaaagcgcccggcaggtccgccgggcgcggcaatgtcagctgatgaacatggcgtcgccaaaggagaagaagcggtatttctcccgcaccgcctcctcataggcggccagcacgtgctcccgcccggcgaaggcggacaccagcatgatgagggtgctctccggcaggtggaagttggtcaccaggccgtccatcaccttgaatcggtagccggggtagatatagatgtccgtccagccggacttggcctccatgtgtccgtcctcggcggcccaggattccaatgtccgacaggaggtggtgcccacacagatgcaccggcccccgcccttccgggtctcgttgatgaggtccgccgtctcctgggggatggtgcagtactcgctgtgcatggggtggtcctcaatggtgtcctccttcacgggccggaaggtgcccaggcccacatggagcgtcacatacccgatctttacgcccttggcccggatcttctccagcagctccggggtgaagtggagccccgccgtgggggcggcggcgctgcccaggaccttggagtacacggtctgataccgctcctggtcctggagctcctccttgatgtaggggggcagaggcatcttgcccagccgctccagcgtctccagaaagatgccctcgtagtcgaagcggatcaggcggccgccctcctccagctgctccacgatctcggcggtcagctccccgttgccgaaggacagtctggtgcccttgcggagcttccggcccgggcggaccagacactcccacaccttgtctcccctgtcgttcagcagcagcacctcgcagatgccgccgccgggcagccgctgtcccaccagacgggcgggcagcacccgggagttgttcaaaatcaggcagtcgccggggttcaggtagtccggcaggtcgtagaaatggtggtgtcccgtggcgccgctcacccgatccagggtcatcaggcgggaggtgtcccgcttctcgatgggggtctgggcgatcagctcctggggcaggtcgtagtaaaaatcactggtcttcatgttgcttccttctcgttaccggacacggatgccggtgaaataaaattccaaaatgtcgatgtagtcgtggccctgctccgccatggccctggcgccgtactggctcatgcccacgttatggccgtttccggtgccggtgatggtgatgccgccccgggaggcggagccccgcccgccggagctgccgccggtgaggtccgccgttccggaggcggagatggcggcgtggtcctccccctctaggcggctgacggtgccgctgccggagatgacggacgcaccgtccagagccgacagggtgccggaggcgctgttcaccgcgtagctgctgccgcccccggtgccgccggtgatggtgaaccgcaggctggggacgttcttgcccagggtggtgctgtaaaaggccatccgggcatcgtcccccgtgcggaccagggtctttccgcggctgtccacaaaggtcacggaatacacgttgcccagatcggtgacttccgatacataggcgtccaccacgtccccgatgtcgtagccgctgttctgcagcacccaggtcagctcctcccaggtataggtgaccgtccacctgtaatcaggaatggagatctgcgcctcgtaggggtcttcctttccccggagatagggcacgtcggtgccccagacgttctccgcgtcctcggtggcgccgccgtcggaggagtggtagtaggcctgggccagctcgccgtcataatagaggcactccccctccgtctcctccaccgcccggtccgtggcggaggtggcctcaccgatgccgctgtacgcttggcagtctgtggagctgcacacgtcgaatccgtaggcggacaggtgcttggtggtgaggcaggcaaaggtccgggcgcacacggcctgggccttcaaggcctccagctcccagttccccggcatttcagagggcagaacgcccttcacatagtcctccaggtccaccacgttcaccacctgcagcccgccgccgctgacggtgtactcgaacccgccccggtagcggttcccccggaaccaggtgacggggtcccggccctggggcatcacggccagggtgtcctccctgctctcatagaggacccggtctgtgccggtgatggtcacctggatgccgtcccggcctgccggctccatggtgatggcggtctcgtccgtctcacccagggacacgaaggtccggtcgtcctcgaagtacccgaactcgtaaccgctgccctcatcgttttccaggttggcggaggacatgacggaggagccgtaccgcagccccaccttcaccgtatcattggtgacggcggaggcgctgacagtacccagggcgtaaaatgtcacaatcagcgacagcaggaacaagccttttttcatggaacctccccaagccatgcaccttgacggaatcgcagaagtatgctaatatatgtacaaatgtccgtgctggaagtacaggctttctacatcaatatggatcattatagtacattccggcgccatattcaaccaaaatcgacggaaggcatcgcgtttttccgccgcaacatgggagcaggaggcacatactatgaaacagtacaaagtcggaatcatcggcggcaccggcatggtgggccagcgcttcatcacgctgatggagcatcacccctggtttcagctgacggccatcgccgccagcgcacgcagcgccggcaaaccttacgccgaggcggtggcgggccgctgggccctggacgtccccatgccggaggaggccaaaaatctggtggtcctggacgcggagcaggacgcggagcggctggcctccatggtggatttctgcttctgcgccgtggacatgaagaaagaggagatccgggccctggaggagaaatacgcgagactggagtgtcccatcgtctccaacaactccgcccaccggtggaccgacgatgtacccatggtagtcccggagatcaacgcggaccatctggcggtgatcgaggcccagcgcaagcgcctgggcacccgccggggcttcatcgccgtgaagagcaactgttcgctccagagctacgtcccggccctgcaccccctgaagaagtacggcctggacaaaatcctggtctgcacctatcaggccatctccggcgccggcaagaccttccagcgctggccggagatggtggataactgcattccctacatcggcggcgaggaggagaagagcgagcaggagccgttgaagctgtggggccgcgtggaggacgggaagatcgtcagggccgacggcccctccatcaccgcccagtgcttccgggtggcctgccaggacggtcacatggccgcggtgtttatgaaattcgcggacggcaaggccccctccatagagcagatcaaggccgactgggccgccttccggggcgtaccccaggagctggaactcccctccgcccccaagcagttcctccactactttgaggagcctgaccggccccagacccggctggaccggaacctggagcacggcatggccgtgtccgtgggccgcctgcggccggacacccagtacgactacaagttcgtgtgcctctcccacaacaccctgcggggcgctgcgggcggcgcggtgctcctggcggagctgctgtgcgccaagggatacatggactgattccatctcatacatccacaaaagagacggcttgccggagttggcaggccgcctcttttatcctcagacctgcatcaaatttaggaattggaaatttgaaatggaggtgttccgccgcaggcggaacgattttaaatttccaagctccaccgggcaccaaaatttctaattccccatttccagctgaaaaggagcgtgtgtacattgaaaaagcctctcttcaccgggtccggtgtggccattgtcacgccctttaccaaagagaccgtggatctccccaccctggggaagctgctggactttcaaatgaaaaacggcaccgacgccatcatcgtctgcggcaccaccggcgaggccagcaccatgagctaccgggagcggatgcggaccatcgagttctgtgtggaccacgtggacgggcggctgccggtgatcgccggcaccggctccaactccacagagaacgccctggccctgtcccgggacgcggagcgggccggggccgacggattgctgctggtgacgccctactacaacaaggccagccaagccgggctcatccgccacttccaggtgatcgccgacggcgtggatgtgccgctgatcctgtacgacgtaccctcccgcaccggcgtcaccatcgcgccggagacgtatgcggagcttgccaagcaccccaacatcaacggcgtcaaggaggcggggggcaatttctccaacattcagaagacccggaacctgtgcccggaggacttctccatctggtccggcaacgatgacgagacagcggccatctgtatgctgggcggcaagggcgtcatctccgtagtggccaacgtcctgccggcggagatgcaccggctgacggagctgtgcctgcggaacgacttcgccgccgccggaaagctgcagctggagctgaaggacttctgcgacgccatgttctgcgacgtgaaccccatccccgtcaaaacggcgctgaacctgctgggctgggacgtgggccccctgcgcctgccgttgtgcgaccccaccgaggccgggctggagaaaatcagggcggccctggaaaagcacgggctgacctccagagtataagccacagccgcccggcgaaagccgggcggctgctgttcggtttatttccgggtactgccgccgtactgctccgaggacaggcgcacctgggcctctccatcaccgatgccggtgatttccaccgtcagcttgttccgcaggtcggcgctctccccttcctggacctggaaagcccggaccagcgtctctccggcggggatgcgaaccatggagaacagctcctggttgatatggcccacggtccaggggcggaagacacgcaccaggatgtcctggtccccctggttctcgatcaccagggcggcatagggcagctccggcatgaagtggaaggtgtacgtcagatccgccccctggagggccacgccgtccacgaaccgccccagataggcggctggatccagcaccgccgggtccacctcggtgaacaccccgcagctgacgccatactccggcacggtgggcgtctccatctgccgctggatgagttcctcccggatgggcgagtcctcttccagcccgtgtccgacgatgacggaggtgccgtcccccacctgaatctccgctttctggttgccgatggcgatgatgcgctccgtgccgtcttcgttctgcgtggtccttctggagaagaactcagcccccgtccagtagatgggctggccgttcccgtccagacggggattgccctccgcatctacggccgcctcagtgccgaaatcaatgcagttcaggtcctcccggtacaccgcgccgtagaccatgtccagcacctccgccgcggtctcggcgctgatgaagtagtggtcctccccgttttcatcagtgtaggtcagcacagtggggatctgcgctccgtcctccgtagtccaggcagcgccggcaggtacctgttccttgccgaacagagccacacccgcctcgccgtaggccacctgtccgttcagcgttccgctctgagggacagcgggcggcctggtctcccccgccagggaggcccccaccagccctaccaacagcagcatggtgctcatgcccgcgataaagggaatgtaattgcgtttcatcagattccttcctttcctgtcaccaggtcacattcctggcaatctccagcagctcttcggcggacaggcccttcccatggagggcgaagatgtagggcccgtccgtccacagcaggtctttttctgtgctgtccgtctcctcttccaccagcaggcccaggcggccgttgacctccacctcagagccctggcaggcggtccccttggaacccaccaggtcctctccctgggtctgcatcagggtgaaggaggcatcctccccccttcggtacgccagacttcgctccccgcggatctcactggtgctgccgcggaccaggatgaagccctccggcacacagcgcagttgggcgtcctggaaaggccgggtggtggtgtgctccaggcggataacgtaccgcagttccccgtctgtctgggaccagtagatctggcagtccgtccggtcccccgcccccacggagagtcccgccgccagggcgcccagcacggcggccgccgccagcagggcccgccagtgccgccgtctccgctgacggcggagcagcgtcgccatccgggcctcgaagtccggggagaagtcatggacgcagtcctcccggtccggcagagcggagaggaatttctccgccgcctccggcgccgccgcgtacagggcctcctctgagatcatcatggcgtctcccccctctcatccagaatttccgccagcttcttccgggcccggtgcaaggtctgggtcacggcatcaggggtggcggagagaaatcccgcgatctcccgggcggaatagccgttgtagtattttagcagaagcacctcccggtaccggggcggcagggatgccatggcatcggccagaccgccgccctccggcggtgcggaccagacggtctgttcatccagctccgtctccggatggcgctggtgggagcgatatagatcgatggccttccgctccgccaccgtcaccaccagattccgcgtccggggacaggggccgtcggggatagtcgccatgtgctccgccagcttcacgaaggactggtgcaccgcgtcctctgcgtcttgtggatttttcaggatgtgataggccacatggtacatgaggccccggtaggccaggtacagcgattcaaacctggtccgatcatccgctgtctccatggttgccagatattccagcatggcgttccctcctgtccctctgctctctatgacgctggagcgggcgcaaatttgacggccggatttgaaaattcatgaaaacaggcgggagtactcccgcctgttctgctatgcagcgcccagctccgcctcctgctgccggaccgaggcctccatggcctccaggctgtccagggacagcagatcgctgaatatataattctgcagctccagccccggaataccagtctggaactccccgttttccgtgctggccaaaaggatgctgtcctggaggagacctcgcagctcccagaaaaacccggcgatggcctccgggtcaaactggtgttcctcccggccaaagttgatgtcaaaggttaccgacctgttgtccgatgtgtatgcctgcccgttcccatcaaaggcccacaattcataggcgtattccgcccagccctggtacatctccggctcgtattgcagcaggtagtcctcgccatcgatcttgcaggcaaatacgctggtccagccggcatgggacggatgggctccggcggaccacaactccacgccgtcctgccggatgacctgcaggatataccaagcgggatagtaatctgtctccggggtgagcaccgtcaccagctccgtggtctccggcatgccgtcgtggtcgaagtcgtagtcctccgacagtacctctgtggtctgttccaaagcggagccagacagcgttccgtcctggttcatacgcacggtgcagcggtaggtgtggggctcccctgcgtccccaccccggccgaccgtcagcaacagggtgtccatgtccggccatgtgccccagtcctccgggagaaattcgtactccgggatggggctgccgtccggcagggtgaagtccaagctgatccagcaggcggtggagatgaccttcacctgggtccaggtccggccgccataggcgatagccaccagattatttgccggagaccaccgcgccgactgccagagcgccccttggtcctgccagagaagttcaccggtctccgtgtccacgatctgcaggaattccggcaccacgtatccgctgacatacatctcactctttcccgctgtccggacctggaaccgcccgttgggggacagggtctctccctccacctgggctaccggtgcggcctccagaggcgcttggtactccgccgtctcctgccgctgtgccgccatttggggggacgccacccccgctgtgaccgccgtgataactgccagtgccaacacgccaaaaatccgccgtttgtccatgaaaaaccaccccgcaagctgttttgcaaacagtttacagggtggttttgcctgatgtcaactacaatccagtaacagctcagccgttcagccgggcaagcatctcctcccgggccccggcgatatacgcatcgtaggtgcacatcttgtcgatgagcttcccgtccacgaactccatgacccggttggcgatggtctggacaaactcatggtcgtggctggcgaagaggaccacgcccttgaagtcgatcaggccgttgttgacggcggtgatggactccaggtccaggtggttggtgggctggtccagcaccagggcattggaaccgaacagcatcatccgggacaacatgcaccggaccttctcgccgccggagaggaccttaacgggcttgtacacgtcgtcgccggagaacagcatccgccccaggaaggaccgcttgaaggactcggtgccctcctccgcgttgtcggcggtgtactggcccagccagtccaccagattcaggtcgcagtcgttgaagaaggcggagttgtccagggggaagtagctggtggtgatggtggtgccccacttgaaggtgcccgcatccggctccagctcctccatcaagatcttgaacagcgtggtggtggcgatctcgtcctcccccacgaaggcgatcttgtcgcccttgttcacccggaagctgacgttgtccagcaccttccggccgtctacggtcttggtaaggccctccaccgccagaatctccttgcccggctcccggtccatcttgaagcccacgaagggatagcgccgggaggaggcgggcatctcctccaccgtcagcttgtccagcagcttccggcgggcggtggcctgcttgctcttggacttgttggcagagaagcgggagacgaactcctggagctccttgatcttctcttccttcttcttgttctggtcccggatcagccgctgcatcatctggctggactcgtaccagaactcgtagttgcccacatacatcttgatcccgccgtagtccacgtccacgatattggtgcacacagtattcaggaagtggcggtcgtggctcaccacgataataaggctctcgcactccaggatgaagtcctccagccactccacggcgtggatgtccaggtggttggtgggctcgtccagcaggatgatgtccggcttgccgaagagggcctgggccagcagcaccttcaccttctccttggcggtcagcgtgctcatctcgctgtacagaatgtcctcggacaatcccaggccctggatcaggcggctcacgtcgctctccgcctcccagccgtccatgtcggcaaactccgcctccagctcgctggccttcacgccgtcggcgtcggtgaagtcctccttggcgtagagggcgtccttctccttcatgatatcgtagagccgctggttgcccatgatgaccgtgtccagcaccgtgtactggtcgtactggaagtggtcctgcttcaaaacgctcatccgctgatccttggagatcaccacctcgccggtggtaggctccagatccccggagaggatccgcaggaaggtggtctttccggcgccgttggcgccgatgatgccgtagcagttgccgggggtgaacttcaggtccacgtgcttgaacagggtctgtccgctgaaattgagactgacgtcattgactgtgatcatagcttgtatcctttttcatatctgcgtatttcatcgcggcagtaggcgcgttttccgcgcctgctgccgctctgtgatccgattagccctcttccgcgatcttgcggcccatgagggtgcccatgacagaggccatcatcaatccccgggtccagccggagctgtcgcccaggcagtggaggccctggaggctggtgttgaagtcggtgtccatcttcacccggttggaatagaacttcagttccggggagtacagcagcgtctcataggcggcgaagcccggcaccacgtagtccatggcttggatgaagttgatgatgttggtcatggcccggtagggcatggcggcggtgatgtcaccggccacggcgtccggcagggtgggccggatgttggactgggccagctccttctgccaggtgcgcttgccatccagaatgtccccgaaccgctggaccaggatctggccgttggccagcatgttggtcagctcgcccaccttctgggcataggcgatgggctggttgaaggggatggagaaattgtgggagcacaggatggagaggttggtgttgtcgctcttcaggtccttgtaggagtggccgttcaccactgccaggttgttgtcgtagttctcctggctgacgaagccgccggggttctggcagaaggtgcggaccttgttcttgaagggcttgggatagcccaccagcttggactcgtacagcacccggttcaccatctccatgacctcgttgcggacctccacccggacgccgatgtccacagtgccgggggcgtgggcgatgttgtgctcggcgcagagcttctccagccagtcggcgccccggcggccggtggccaccacggtatgcttggcgtagatctccaggtccgtcttgccgtcggagatggccacgcccttgcagacctcgttctccaggatcaggttgctgcactcatagccgaagtacatctccaccccgttctcctgtaagtaccgctcgatggcgaggtaaatgccctgggccttctcggtgcccatgtggcggatggggcagtccaccagcttcagccccgcctggatggcccggcggcggatctccttccgctcctcctcgtggcccaggccctcgatgtgctcatccgcgccgaactccaggtagatctggtcggcgtagtcgatggtctcctgggccaggtccgccccgatcagggtgggcaggtcgccgcccacctcatagctgagggagagcttgccgtcggagaaggcgccggcgccggagaagccggtggtgatgtggcagtagggcttgcagttcacgcacttcttggtcttgtccttggggcagtggcgcttttccaccggctgtcccttttccaccatgacgatcttctggcggctgcccttcttaatcatctccaaagcggtgaagataccggcggggccggcgccaacaatgacaacatctgcgttcatagtcttctctcctcgtttttcctcatttggctgacaggtccaccccgcggcgcaccagggaatacggcggcaccgccttgggaaggtccatatagaatttcatctgtggggtgcggggttccaccagggacgcccccgcctcgtcccgcatctccggcacggttatggagaagggccgcagatccgggcccacgatctccaccgtgtccccggcgcggaacttgttccgcagggacagcacggcgtgcccagcgctgtcgcagtccgtcaccaccgccgccacctgccattcccggacatagcgggaggtggcgtaatactggcccggcgggccgtagtaaaagccggtggagtagggccggtggctcacgtgctccacctcgtcccgccacacgggatcgacggactcccctgccgccgcggcgtccaaacagtggcggtaggccccggtgacgatggccgcgtagtaggcggacttggcccggccctcgatcttcaaactggagaggcccgcgccgcacaggtcccccaggtggtcgatcatgcacatgtcccgggagttcaggatataggtgccctgctcgtcctcaaacaccgggaaatactctcccggacgcttctcctccaccagggcgtactggtaccggcagggctgggcacaggcgccccggctggagtcccggccggtcatatagttggagagcaggcaccgccccgagtagctgacgcacatggcgccgtggacgaaggcctcgatctccaggtccgccggggtcttgtcccggatggtgcggatttcctccagactcagctcccgggccaggatcacccggctggcccccaggtcgtgccaggcccgggcggtctcgtagttgcagatgctggcctgggtggagatgtgccgctcacaccggggggcgtacttccccgccatggtaaaggcccccaggtccgccacgatcagggcgtccaccccggcgtccgccagccgttccaggtgctccggcaggcgggccgcctcgtcgttccggggcatggtattgatggtgcagtggacccggacgccgtggctgtgggcaaaggccaccgcctggggcagcgcctcatcggagaagttccccgcaaaggcccgcatcccaaagctggtgcccgccagatacactgcgtccgcgccatagagcacggccattttcagccgctccatgtcccccgccggggccagcagctccggcttgtcccgcttaaccgccataggagctgctgttgacgaacgcgttgtgttccgccagcgtggtggagaagtggtgcttgccgtccgtgcccagggcgtagtaatagtagtccgtgctgttggggttcagcgccgcgtcgatggaggccaggcccgggttggagatgggcgtggggggcaggcccgcgttctggtacaggttgtagggggagtcggtctgcatgtccgcgctggtgatggggccggtgtggtccggcagcgcatagagcagagaggcgtcgatctgcagcaggccgtaggtcccctgcttgttgccggagccctccagccggttgtaaatgacagaggcgatgttggcctgatccgtgccgtcggtctcctcctcgatcagggaggcgatggtgatgatctcctgcagggagtagctggactcctccacctgggtcatccgctcctcgtccatgcggctgacaaagttgcggatcagccggtccagggcgtcctcggcgttatggcccacatagaactcataggtgtccgggaagaggaagccctccagtcggctcaggtcctcggattcgttgtcgatgaagtcgtagtcaaaatcgccggtctgggcggcctcggtcagggcctcctccgtgttgacgcccttttccgccagcagggcgatggtctggcggacggtgtagccctccggaatggtgacggtcaccgtctccgcgctcaggttgccggaggagctgcgcatccccgcgatcagggcgtggtagtccatgtcggtgttcagctcataggtgccgatgcccacctcttcgctggcgccggtgacggccgcgaacaggcggaagaaccacttgtagcggatcagtccggcgtcctgcagcttttccgcgatgctgcccatgtcgtcatccgcggtgatctcaatggtgatcttggtggtggaggggatgtcccggctgaaagcacacaggtcgctggccagcagccagcccacgccagccaggatggccgaggccaccagcacgcacaggatatacaggaccgggttgatccggcggcgcttgcgccgccgccgctgcggctgctgggacggattgccctggctcctccccgtatggcccgcctggctgcggcgcacctgggacgcgtcccagctggcggtatcgccgtttttgtaatcagacataggaacctccattttctcgccccggcggtgcgccgccggaaacgtcccgggatggggaagaaatcttcccctccctgcaatttttttcagcggccaggctccctttggaagccgggcgcatagaatgtctcaaagcgaggtgacaatcatgtgcttcaacaacggaaacaacaattgttcctgcctgtggctcatcatcatcgtcgtgctgatctgctgctgctgtggcagcgggaacgccctcggcggcaatagctgcggctgtggctgcggctgcgggtgcggcaacgacggctgcaacaacggctgctgctgacggctgcggagaaaatggggcgtgttcgtcccattttctttgctcccgtcggggacagcccctagttcagcagcggctccacccgagagagcacctcccggcggatgtcctccattgtccggggcgcgtccccggcggcgcagtcgatcaccgaccagcccagatcccgggcaatctcgcgggcgccctcccggcagcggcggagataagccccgtcctgctcgtgaatgtccgcagcggtggcggtcgcctgctcccgatgccggagcatcttctcagacacctctgtgggcagatccaggtacagcaccaggtccggcgcgggcaggcccatgcggccgtattccaggtcgaagagccagtccagaaatgcctgccgctccccttccgggagcttggatgcctggtggacggcgttggaggtggtgtaccggttggccaccacgatgccgccttcctcatagaacccgccccagtcctccttgtaggaggcgaagcggtccacggcgtacagcaccgacgcggcgtaggcgttcacgtccccgggcctgttgcccagggctccgtggaggtagaggttcgccggttcggcaaaggggttgccataccggggaaagtcgatctcccgatatgcgatgccccgctgggccagggtctcgcacaggagctttgcctgggtggccttgccggagccgtccgtgccctcgaatacaatcagttttccgctcatctgtgtctcttctcctgcttgacatggattaaaaacagcggcagcttcatcatccggccgatgcggcggggctccttgcacaggcggtagaaccactccagcccgtggtcggtccagaattttggggcccgctccaccacgccggcgaatacgtccagactgccccccaggccgcacaacagccgggcgcctgtggcggtgccgttcttcgccatccacttctcctgcttgggggcgcccaggcagacgaacaccacgtccgcgccgctttggcggatggccgctaccaccgggccgtcctccttgaaatagccgtcgtgggtgccggcgatccgcagccccggatgggccgcggccagcttcgctcccgcctgctccgcaacaccgggcttggcgcccaggaggtagagggacttcccttcctccgccagtttatccatcaaatgggtcgcgaattcaacgcccggcgtcctttccttcagaggcgtccccagcatggccgcgcccttgatgacgccgatgccgtccggcagcaccagatccgcgccgttcaccgcggccctggccccgctgtcctcccggcagacctccacgatctccggattgggggtcaccacatagtgggggcccggactgcggaccagctccatcccccgctccacggcctctgccatggtcaggttgtcaaagccgacgcccagcacgtcgatgcgcatggaatcacctcgctacatactcatacaggatagcagtataccacaagccgccgcgtttgtccaaccaaaaatcaacagggacgccaaaaaccggcgtccctgctgaacgattcagttttccggcgccggtaccgcctgctttttccggaagtccggcagctgggccagcaccaccgccgccagcatcagcacgcagcccaggtactccttcccactcatccggtcccccaggatcagcgccccggcgacggtggcgaacacggactccagactcagcagcagggacaccaccgtggggttggagtccttctgcgccaggatctggagggtgtatcccacgccgctggagaagatgcccacatacaggacaggcccgatacaggccagcagccccgcccagtcaggcgtctccatgaccagcatcagtccggcagagagcaccgccatcaccaggaactgtacgcaggacagggccaccccgtccaccttccgggtaaagtggtcgatcagcaggatgtgtccggcgaagcagaaggagcacagcagcacgtaccagtccccctccgtgatggaaaaggactcctgcacgcacagcagatacaatcccaccaccgccagcgccacactgagccagatcgcccggggcgccttttgccggaggaaaatccccgcaatgggcacgatgacaatatagagggccgtgatgaaccccgccttgccggaggtggtggtctccagccccatctgctggaggttggtgcccattgtcaggaccacgccgcagcagataccgccgatggccagatcccgccaggaaccgggccgggcctgggcctcctcctgaaaatcccgccgccgcaggcagcggaacaccagacacagcaccagcagaaacacaaaggccaccgcgcttctggcggcggtgaaggtgaagggacccacatggtcggcggccacgctctgggccacgaaggcggtgccccagatcagagccgccagcacggggaatacattttgacggatgtggttgactttcatcagacttgctcctcaccaggatctatgctatacttttgcaaactcccgtagatttgatgtccgggatcaaaagccgcgaacaaataaaaattttaacacaacggggcggaaatggcaagacccggttcctccccgagaaaaggaggcggcccatgctgctgtttgacatggacgggacgctgatcgactccaacggcgtctggaaaaacgtggaccgggaatttctggcccggcggggcattgcgtacacccacgcctattacgagggcgtagcccataccatccttcccctggccgccaagttcaccaaggagtactgccgcctcacggagtcctgcgaggagatcattgccgagtggatggagatggccagggacgcctatgcccatgtcacggtgaagcccggcgtccgggcgtatttaaagcagtgccgggcagagggccgccggatggcggtggtgacctccagcgtgccggagcactgccgcaccgccctgacccacctggacctgatgaagtactttgagggtgtcactctggcccacgacctggggttggagaaaaaggacccggccctgtggcgtgccgccgcagagcactacggcgtggcaccggaggactgcacggtgttcgatgacagcctctccgcctgcaagggcgccagggctgcaaagatgcgggtggtgggcgtttacgacggtttcttcgcccaggacgaggcggccatgcggggattttgcgacgtgtatatccggagctttgaggagctgctgctcccgccccggcaggcactccgcccatgagcggcctgcctgaggccctggagacggcgcgggaggccggagaggtgctctccgccgcggtcctttcccaggaaaacgccgaggggctggacggctccggcctggacttccgggactgccggttccagtcctgccgcctgcggaactgcgatttcaccggcgcagccttttacggctgcaccttcaccggatgtctcctggagaactgccgcctctccgccacctattggaaggactgccgcctctccggctgcaaatgggacggcgcggacctgcgccgctcccggtggaaggacagcgttctggaggagactctgcttcgttatgtcaacttttccggcggcgtctgggagcgtatttccgtgaaggaatgtgacttcacagagtctacgctctcggagatgcggctgaaaaaagctgccatggagaagacggatctgaccggggcggagctgtttcgcaccagccttgccggcatggacctgacggcctgcaccctggaccggatcgtgctgtcggagacctgccgggagctgaagggcgccgtcatcaacgccgcccaggccgcggtggtggcccggattctgggcatccgggtggagccgtagggggggcatctgtccagccgcaggcatggctgatccccgtgcaatggaccggatctcccacccccgatcacacacaaaacaccagggcccgccgaaaacggcgggccctggtgttcagattgctttctgctggccgatcacgtcccggcaccaggcaaacagccggtccgtgagggctgtcaggtcctcccggcactcccctgctttcagggcctgggcagtttgcagaatctccaggtcctgcccggtcaggtgctgttccaggtctgatctccggcggcagtagagcccctgctctgcatacagcttggcctgcagcaggaacacggcggccttgcaggcctccgccaccgcctcccggcttctgccgtggagaaagttgtggcagcacaggtgatacagtccgcaggccccctgatggagggcccggcgggcgtcccctggctcctccggcggcagcaggtccgcaaggcgtccgcaccagtcggtggtgtcccggcggaactggaacagctccccccggtcccaggccgccagctccgccgtaccggagacgaagccgcacagcttgtcccggtccggcaggtccttcacggctgcccgataggtctccaggtcttgcagagagcagctgtccagaatgcacaccacgtcgatgtcgctgtccggtccggcttctcccctgccccggctgccctggaggccgatgtaccgcacccggtccccaaaggcggcccggacggccccgcagtattgcttcatccagttttcgatctccatcatcacagtttcctcatgtgggctcccgcggatttcagcatcagcttctttttgcccacggtgtcaaaggccacttccgccagggcgtcgccgcccatgggccggacagagagcaccatgcccttcccgaaggcggtatgctccaccatgtccccctgctgtaattgcagcagaggcgccgccggggcggcgttcttccgggtggaggacgcctgctggacagaggccaggggccgctggggcgcctgggccggggcccggtagctgtggacgccgccgctgctccaggagccgccggcgcgggcgggggagctgccccagccgtcctcgtaccggtcgccgccgaaggtgccgtcgtgctccataccgccgaaacggggctccggcttgctctcccagcgcatgttctcctccgggatctcttccaggaaccgggaagcccggttggcgctggtacggccgtacagcatccgctgccggcagttggtgagggtcagcttctccttggcccgggtcatggccacgtagcagagccgccgctcctcctccagctcctcctggtcgtactgggcggaggcgccggggaagatcccctcctccatccccaccacgtacaccaccgggaactccagccccttggcggagtgaatggtcatcatggtgacgcagtcgtcgctggcctccacgctgtccagatctgtgtacagggcaatctcgttcaggaagccggagagggtggcgtcctccggctgctgctccaggaagcccaggatgttggatttcagctcctgaacgttctcgatgcggccccggctctccatgtcgttcttctcctccagggcctttacatagccggtctggtcgcagacggcgtcgtagaactccggcagggccagctccgtgcccgcccgccgcaggccgtcgatcaggtccgcgaacttcagcagcttggcggaagacgctttcagctccgggaacaggtccgcgttgcggatgatctcatacagcgacgccccctggctctccgccaaggcgcccaccttgtccaatgtagtggcgccgatgccccggggcgggttgttgatgatccgccgcagccgcaggtcgtccagggggttgttcagcacgcacagataggccagcatgtccttgacctccgcccggtcgaagaacttcatgccccccactactttataggggatgccgttgcgcttcatggcgtattccagggcgttggactgggcgttcatccggtagaggaccgccgtgtcccggaagttcctgccccggttcacccccatcaggatgtccccggccacgtagttggcctcgtcgctctcgttgaaggtggtcttgaccgtcaccacatcgcccccgccgttgtcggtccagagggtcttgcccttgcggccctggttgttctggatgacggcgttggccgcatccagaatgttctgggtagagcggtagttctgctccaggcgaatggtccgggcggtggggtactgctcttcgaagttcaggatgttttcgatgttggccccccggaagcggtagatggactggtcgtcatcgcccaccacacagaggtttttgtacccccccgccaggaggcttgtcagcagatactgtaagtggttggtgtcctggtactcgtccaccagcacgtagcggaacttgcgctggtagtagtccagcaccgaccgctcctgctgcagtagtgttaccgtgtgaaagatgatgtcgtcaaagtccagggcattggcggtgcggagcttcttcgcataggcggcatagatcttggcgatgcgggtcatcttccagtcccccgccgcctcgtaccgcttggcaaagtcctccggcgtctcatactggtccttggagtggctgatggcggccaggacgctccggggcgggaaggtcttctcctccaggttcagctccttcagaatgtccttgatgacccgcttggagtcgtcggtgtcgtagatggtgaagtccttgtcgaaccccagccggtcgatgtcccgccgcaggatgcgcacacaggcggagtggaaggtggaggcccagatgtcgttggcctccggccccagccgggcggccagccggtccttcagctcccctgccgccttgttggtgaaggtgatggcgatgatctcccagggcttgggcgcgtccagggcgcagagccgccgggcccggcggacgtcctcctccgtgggccgggcggggaagctctccagaaattgaagatcctcttccgtggcccaggccggcacctcttccgaatcgcttccccggccgtaggtgagcaggttgtacacccgctggatcagcaccgtggtcttgccgctgccggcgcccgccagcagcagcagcggaccctccgtggtcatggcagcctggcgctgcatggggttcagcctggataagtcctgggcgatgaccgcccggcgggcggcgatgtagcgttgtttgaagtcttccataagtccaccgttctccatccgtctcaaaagtctcggcccctattttacggcaaaatccccttccggtcaaggcgggaaacggctgttgccggtttgccgcttttgttaccaatttgaggttgacaaatgtctacctatttgatatggtccaatcagaagaccaggtagacactcgtataccatggaggtgagactatgcaggtgaacctgtccgacagcgagtggaagctgatgaaccggctatgggagcagtcccccggaccatcatggagttgacggcctccctgaaggaggacacaggctggagcaagaacacggtgatcaccatgctcgcccggctggaagccaagggggccgtccggcacgaggagggcggccgggccaagcggtacttccccgcggtggaccgcgaggacgccgcggcggcggagacggagagcttcctctcccgggtctacggcggcagcctgggcctgatgatgagcgccatggtggagagccgccagctgacggaggcggacatcgcggagctgtccgctattttggaacgagcgggaggcgaggaac

SEQ ID NO: 2 - RNA, 1428 nt, Dysosmobacter welbionis
  source 1..1428: mol_type = rRNA
cgcggtaattgagtttgatcctggctcaggacgaacgctggcggcgtgcttaacacatgcaagtcgaacggagcacccttgactgaggtttcggccaaatgataggaatgcttagtggcggactggtgagtaacgcgtgaggaacctgccttccagagggggacaacagttggaaacgactgctaataccgcatgacgcatgaccggggcatcccgggcatgtcaaagattttatcgctggaagatggcctcgcgtctgattagctagatggtggggtaacggcccaccatggcgacgatcagtagccggactgagaggttgaccggccacattgggactgagatacggcccagactcctacgggaggcagcagtggggaatattgggcaatggacgcaagtctgacccagcaacgccgcgtgaaggaagaaggctttcgggttgtaaacttcttttgtcagggaagagtagaagacggtacctgacgaataagccacggctaactacgtgccagcagccgcggtaatacgtaggtggcaagcgttgtccggatttactgggtgtaaagggcgtgcagccgggccggcaagtcagatgtgaaatctggaggcttaacctccaaactgcatttgaaactgtaggtcttgagtaccggagaggttatcggaattccttgtgtagcggtgaaatgcgtagatataaggaagaacaccagtggcgaaggcggataactggacggcaactgacggtgaggcgcgaaagcgtggggagcaaacaggattagataccctggtagtccacgctgtaaacgatggatactaggtgtgcggggactgaccccctgcgtgccgcagttaacacaataagtatcccacctggggagtacgatcgcaaggttgaaactcaaaggaattgacgggggcccgcacaagcggtggattatgtggtttaattcgaagcaacgcgaagaaccttaccagggcttgacatcctactaacgaagtagagatacatcaggtgcccttcggggaaagtagagacaggtggtgcatggttgtcgtcagctcgtgtcgtgagatgttgggttaagtcccgcaacgagcgcaacccctattgttagttgctacgcaagagcactctagcgagactgccgttgacaaaacggaggaaggtggggacgacgtcaaatcatcatgccccttatgtcctgggctacacacgtaatacaatggcggtcaacagagggaggcaaagccgcgaggcagagcaaacccccaaaagccgtcccagttcggatcgcaggctgcaacccgcctgcgtgaagtcggaatcgctagtaatcgcggatcagcatgccgcggtgaatacgttcccgggccttgtacacaccgcccgtcacaccatgagagtcgggaacacccgaagtc
